United States Patent Application Publication US 2025/0051766 A1 - sequence listing, part 14

SEQ ID NO: 5065 - DNA, 58617616 bp, Homo sapiens (residues 26,052,277-28,223,299 of 58,617,616)
  source 1..58617616: mol_type = genomic DNA
atattcagacctctttgaagccttcgttggaaacgggatttcttcatgttatgctagacagaagaattcccagtaacttccttgtgttgtgtgtgttcaactcacagagttgaactctcatttacacagagcagatttgaaacactctttttgtggaatttgcaagtggagatttcaagtgctttgaggccaaaggcagaaaaggaaatatcttcgtataaaaactagacagaatcattctcagaaactgctatgcgatgtgtgcgttcaactctcagagtttaacttttcttttcattcagcagtttggaaacactctgtttgtaaagtctgcacgtggataacttgacctacttagaggccttcgttggaaacgggtttttttcatgtaaggctagacagaagaattcccagtaacttccttgtgttgtgtgcattcaactcacagagttgaacgttcccttagacagagcagatttgaaacactctatttgtccaatttgcaagtgtagatttcaagcgctttaaggtcaacggcagaaaaggaaatatcttcgtttcaaaactagacagattcattcccacaaactgcgttgtgatgtgttcgttcaactcacagagtttaacctttctgttcatagagcagttaggaaacactctgtttgtaaagtctgccagtggatattcagacctccttgaggccttcgttggaaacgggatttcttcatattctgctagacagaagaattctcagaatcttccttgtgttgtgtgtattcaactcacagagttgaacgatggtttacacagagcagatttgaaacactctttttgtggaatttgcaagtggagatttcagccgctttgaggtcaatggtagaaaagtaaatatcttcatataaaaactagacagaatgattctcagaaacttctttgtgatgtgtgcgttcaactcacagagtttaacctttcttttcatagagcagttaggaaacactctgtttgtaaagtctgcaagtggatattcagacctgtttgaggccttcgttggaaacgggatttctccatactatgctagacagaagaattctcagtaacttccttgtgttgtgtgtattcaactgacagagttgaactatcatttagagagagcagatttgaaacactgttttgtggaatttgcaagtggagatttcaagcgctttggggccaaaggcagaaaaggaaatatcttcgtataaaaactagacagaatcattctcagaaactgctctgcgatgtgtgcgttcaactctcagagtttaacttttcttttcattcaacagtttggaaacactctgtttgtaaagtctgcacgtggataacttgaccacttagaggccttcgttggaaacgggtttttttcatgtaaggctagacagaagaattctcagtaacttcattgtgttgtgtgtattcaactcacagagttcaacgatcctttacacagagcagacttgaaacactctttttctggaatttgcaagtggagatttcagccgctttgaggtcaatggtagaaaaggaaatatcttcctataaaaactagacagaatgattctcagaaactcctttgtgatgtgtgcgttcaactcacagagtttaacctttctttttatagagcagttaggaaacactctgtttgtaaagtctgcaagtggatattcagacctccttgaggccttcgttggaaacgggatttcttcatattatgctagacagaagaattctcagtaagttccttgtagtgtgtgtattcaactcacagagttaaacgatcctttacacagagcatacttgaaacactctttttgtggaatttgcaagtggagatttcagccgctttgaggtcaatggtagaataggaagtatctccctatagaaactagacagaatgattctcagaaactcctttgtgatgtgtgcgttcaactcacagagtttaacctttcttttcatagagcagttaggaaacactctgtttttatagtctgcaagtggatattcagacatctttgaggccttcgttggaaaccgtgatttcttcatattctgctatacagaagaattctcagaaatttccttctgttgtgtgttttcaactcacacagttgaacgatgctttacacagagtagacttgaaacactctttttgtggaatttgcaagtggagatttcagccgctttgaggtcaatggtagaaaaggaaatgtcttcgtataaaaactagacagaatcattctcagaaactgctctgcgatgtgtgcgttcaactctcagagtttaacttttcttttcattcagcagtttggaaacactctatttgtaaagtctgcacgtggataatttgaccacttagaggccttcgttggaaacgggtttttttcatgtaaggctagacagaagaattcccactaacttccttgtgttgtgtacattcaactcacagagttgaacgttcccttagacagagcagatttgaaacactctttttgtgcaattggcaagtggagatttcaagcgctttaaggtcaatggcagaaaaggaaatatcttcgtttcaaaactagacagaatcattcccacaaactgcgttgtgatgtgttcgttcaactcacagagtttaacctttcttttcatagagcagttaggaaacagtctgtttgtcaattctgtaagtggatattctgacatcttgtggcattcgttggaaacgggatttcttcatattctgctagacagaagaattctcagtaacttccttgtgttgtgtgtgttcaactcacagagttgaacgatcctttacagagagcagacttgaaacactctttttgtggaatttgcaagtggagttttcagccgctttgaggtcaatggtagaaaaggaaatatcttcgtataaagactagacagaatgattctcagaaactcctttgtgatgtgtgcgttcaactcacagtgtttaacctttcttttcatagagcagttaggaaacactctgtttgtaaagtctgcaagtggatattcagacctctttgaggccttcgttggaaacgggtttttttcatataaggctagacagaagaattctcagtaacttccttgtgttgtgtgtattcaactgacagagttgaactatcatttagagagagcagatttgaaacactgtttttgtggaagttgcaagtggagatttcaagcgctttggggccaaaggcagaaaaggaaatatcttcgtataaaaattagacagaatcattctcagaaactgctgcgtgatgtgtgcgttcaactctcagattttaacttttcttttcattcagcggtttggaaacactctgtttgtaaagtctgcacgtggaaattttgaccacttagaggccttcgttggaaacgggtttttttcatgtaaggctagacagaagaattcccagtaacttcccttgtgttgtgtgcattcaactcacagagttgaacgttcccttagacagagcagatttgaaacactctatttgtgcaatttgcaagtgtagatttcaagcgctttaaggtcaacggcagaaaaggaaatatcttcgtttcaaaactagacagaatcattcccacaaactgcgttgtgaggtgttcggtaaactcacagagtttaacctttcttttcatagagcagttaggaaacagtctgtttgtaaattctgtaagtggatattctgacatcttgtggccttcgttggaaacggggtttcttcatattctgctagacagaagaattctcagtaacttccttgtgttgtgtgtattcaactcacagagttgaacgatcctttacacagagcagacttgaaacactctttttgtggattttgcaagtggagatttcagccgctttgagttcaatggtagaataggaaatatcttcctatagaaactagacagaatgattctcagaaactcctttgtgatgtgtgcgttcaactcacagagtttaacctttcttttcatagagcagttaggaaacactctgtttgtaaagtctgcaagtggatattcagacctctttgtggccttcgttggaaacgggatttcttcatattatgctagacagaagaattctcagtaacttccttgtgttgtgtgtattcaactcacagagttgaacgatcctttacacagagcagacttgaaacactctttttgtggaatttgcaagtggagatttctgccgctttgaggtcaacggtagaaaaggaaatatcttcgtataaaaactagacagaatcattctcagaaactgctctgcgatgtgtgccttcaactctcagagtttaacttttcttttcattcagcagtttggaaacactctgtttgtaaagtctgcacgtggatattttgaccacttagaggccttcgttggaaacgggtttttttcctgtaaggctaaacagaagaattcccagtaacttccttgtgttgtgtacattcaactcacagagttgaacgttcccttagacagagcagatttgaaacactctttttgtgcaattggcaagtggagattacaagcgctttaaggtcaatggcagaaaaggaaatatcttcgtttcaaaactagacagagtgattctcagaaactcctttgtgatgtctgcgttcaactcacagagtttaacctttcttttcatagagcagttaggaaacactctgtttgtaaagtctgcaagtgcatattcagacctcctttaggccttcgttggaaacgggatttcttcatattctgctatacagaagaattctcagaaacttccttgtgttttgtgtattcaactcacagagttgaacgatcctttaaacagagcagacttgaaacactctttttgtggaatttgcaagtggagatttcagccgctttgaggtcaatggtagaaaaggaaatatcttcgtataaaaactagacagaatgattctcagaaaatcttttgtgatgtgtgcgttcaactcacagagtttaacttttcttctcatagagcagttaggaaacactctgtttgtaaagtctgcaagtggatattcagacctctttgaggccttcgttggaaacgggatttcgtcatattatgctagacagaagaattgtcagtaacttccttgtgttgtgtgtattcaactcacagagttgaacgatcctttacacagagcagacttgaaacactctttttgtggaatttgcatgtggagatttcagccgctttgaggtcaatggtagaataggaaatatcttcctatagaaactatacagaatcattctcagaaactgctgcgtgatgtgtgcgttcaactctcagagtttaacttttcttttcattcagcggtttggaaacactctgtttgtaatgtctgcacgtggatattttgaccacttagaggccttcgttggaaacgggtttttttcatgtaaggctagacagaagaattcccagtaactttccttgtgttgtgtgcattcaactcacagagttgaacgttcccttagacagagcagatttgaaacactctatttgtgcaatttgcaagtatagatttcaagcgctttaaggtcaacggcagaaaaggaaatatcttcgtttcaaaactagacagaatgattctcagaaactcctttgtgatgtgtgcgttcaactcacagagtttaacctttcttttcatagagcagttaggaaacactctgtttgtaaagtctgcaagtggatattcagacctctttgaggctttcgttggaaacgggatttctttatattctgctagacagaagaattctcagtaacttccttgtgttgtgtgtattcaactcacagagttgaacgatcctttacacagagcagacttgaaacactctttttgtggaatttgcaagtggagatttcagcggctttgaggtcaatagtagaaaaggaaatatcttcgtagaaaaactagtcagaatgattctcagaaactcctttgtgatgtgtgcgttcaactcacagagtttaacctttcttttcatagagaagttaggaaacactgtgtttgtaaagtctgcaagtggatattcagacctccttgaggccttcgttggaaacgggatttcttcatattatgctagacagaagaattcccagtaacttccttgagttgtgtgtattcaactcacagagttgaactttcatttacacagagcagatttgaaacactctttttgtggaatttgcaaatggagatttcaagccctttcaggccaaaggcagaaaaggaaatatcttcgtatgaaaactagacagagaatcattctcagtaaactgctgcgtgatgtgtgcgttcaactctcagagtttaacttttcttttcattcagcggtttggaaacactctgtttgtaaagtctgcacgtggatattttgaccacttagaggccttcgttggaaacgggtttttttcatgtaaggctagacagaagaattcccagtaacttccttgtgttgtgtgcattcaaatcacagagttgaacgttcccttagacagagcagatttgaaacactctatttgtgcaatttgcaagtgtagatctcaagcgctttaaggtcaatgggagaaaaggaaatatcttcgtttcaaaactagacagaatcattcccacaaactgcgttgtgatgtgttcgttcaactcacagagtttaacctttcttttcatagagcagttaggaaacagtctgtttgtcaattctgtaagtggatattctgacatcttgtggccttcgttggaaacaggatttcttcatattctgctagacagaagaattctcagtaacttccttgtgttgtgtttattcaactcacagagttgaatgatcctttacacagattagacttgaaacactctttttgtggaatttgcaagtggagatttctgcctctttgaggttaatggtagaaaatgaaatatcttcgtatagaaactagacagaatgattctcataaactcctttgtgatgtgtgcgttcaactcacagagtttaacctttcttttcatagagctgttaggaaacacactgtttgtaaagtctgcaagcagatattcagacctccttgaggccttcgttggaaacgggatttcttcatattctgctagacagaagaattctcagtaacttccttgtgttgtgtgtatacaactcacagagttgaactttcatttagagagagcagatttgaaacactgtttttgtggaatttgcaagtggagatttcaagcgctttggggccaaaggcagaaaaggaaatatcttcgtataaaaactagacagaaacattgtcagaaactgctgcgtgatgtgtgcgttcaactctcagagtttaacttttcttttcattcagcggtttggaaacactctgtttgtaaagtctgcacgtggatattttgaccacttagaggccttcgttggaaacgggatttattcatgtaaggctagacagaagaattcccagtaacttccttgtgttgtgtgcattcaactcacagagttgaacgttcccttagacagagcagatttgaaacagtctattggtgcaatttgcaagtgtagatttcaagcgctttaaggtcaatggcagaaaaggaaatatcttcgtttcaaaactagagagaatcattcccacaaactgcgttgtgatgtgttcgttcaactcacagagtttaacctttctgttcatagagcagttaggaaacactctgtttgtaaagtctgcaagtggatattcagacctctttgaggccttcgttggaaacgggatttcttcatattatgctacacagaaaaattctcagtaacttccttgtgttgtctgtattcaactcacagagttgaacgatcctttacacagagcatacttgaaacactctttttgaggaatctgcaagtggagatttcagccgctaaggggtcaatggtagaataggaaatatcttcctatagaaactagacagaatgattctcagaaacttcattgtgatgtgtgcgttcaactcacagagtttaacctttcttttcatacagcagttaggaaacactctgtttgtaaactctgcaagtcgatattctcacctctttgaggccttcgttggaaacgggatttcttcatactgtgctagacagaagaattctcagtaacttccttgttttgtgtgtattcaactgacagagttgaaatttcatttagagagagcagatttgtaacactgtttttgtggaatttgcaagtggagatttcaagcgcttttgggccaaaggcagaaaaggaaatatcttcgtataaaaactagacagaatcattctcagaaagtgctctgtgatgtgtgcgttcaactctcagagtttaacttttcttttcattcagcagtttggaaacactctgtttgtaaagtctgcacgtggatattttgaccacttagaggccttcgttggaaacgggtttttttcatgtaagggtagacagaagaattcccagtaacttccttgtgttgtgtacattcaactcacacagttgaacgttcccttagacagagcagatttgaaacactctttttgtgcaattggcaaatggagatttcaagcgctttaaggtcaatggcagaaaaggaaatatcttcgtttcaaaactagacagaatcattcccacaaactgcgttgtgatgtgttcgttcaactcacagagtttaacctttctgttcatagagcagttaggaaacactctgtttgtaaagtctgtaagtggatattctgacatccttgtggccttcgttggatacgggatttcttcatattctgctagacagaagaattctcagtaacttccttgtgttgtgtgtattcaactcacagagttgaacgatcctttacacagagcggacttgaaacactctttttgtggaatgtgcaagtggagatttcagccgctttgaggtcaatggtagaaaaggaaatatcttcttatacagactagacagaatgattctcagaaactcctttgtgatgtgtgcgttcaactcacagagtttaacccttcttttcatagagcagttaggaaacactctgtttgtaaagtctgcaagtggatattcagacctctttgaagcgttcgttggaaacgggttttttcatataaggctagacagaagaattctcagtaacttccttgtgttgtgtgtattcaactcacagagttgaatgatcctttacacagaacagtcttgaaaccctctttttgtggaatttgcaagtggagatttcagccgctttgaggtcaatggtagaataggaaatatcttcctatagaaactagacagaatgattctgagaaactcctttgtgatgtgtgcgttcaactcacagagttcaaccattcttttcatagagcagttgggaaacactctgtttgtaaagtctgcaagtggatattcagacttctttgaggccttcgttggaagcgggatttcttcatattctgctagacagaagaattcccagtaacttccttttgttgtgtgtgttcaactcacagagttgaactttcatttacacagagcagattggaaacactctttttgtggaatttgccagtggagatttcaagcgctttgaggccaaaggcagaaaaggaaatatcttcgtataaaaactagacagaatcattctcagaaactgctctgcgatgtgtgcgctcaactctcagagtttaacttttcttttcattcagcagtttggaaacactctgtttgtaaagtctgcacgtggataaattgactacttagaggccttcgttggaaacgggtttttttcatgtaaggctagacagaagaattcccagtaacttccttgtgttgtgtacattcaactcacagagttgaacgttccgttagacagagcagatttgaaacactctttttgtgcaattggcaaatggagatttcaagcgctttaaggtcaatggcagaaaaggaaatatcttcgtttcaaaactagacagaatcattcccagaaactgcgttgtgatgtgttcgttcaactcacagagtttaacctttctgttcatagagcacttaggaaacactctgtttgtaaagtctgtaagtggatattctgacatcttgtggccttcgttggaaacgggattttttcatattctgctagacagaagaattctcagaatcttcccttgtgttgtgtgtattcaactcacagagttgaacgatcctttacacagagcagacttgaaacactctttttgtggaatttgcatgtggagatttcagccgctttgaggtccatggtagaaaaggaaatatcttcgtataaaaactagacagaatgattctcagaaactcctttgtgatgtgtacgttcaactcacagagtttaacctttcttttcttagagcagttaggaaacactctgtttgtaaagtctgcaagtggatattcagacctctttgaggccttcgttggaaacgggtttttttcatataaggctagacagaagaattctcagcaacttccttgtgttgtgtgtattcaactgacagagttgaactttcatttagagagagcagatttgaaacactgtttttgtggaatttgcaagtggagatttcaagcgcttgggggccaaaggcagaaaaggaaatatcttcgtataaaaactagacagaatcattctcagaaactgctgcgtgatgtgtgcgttcaactctcagagtttaacttttcttttcattcagcggtttggaaacactctgtttctaaagtctgcacgtggatattttgaccacttagaggccttcgttggaaacgggtttttttcatgtaaggctagacagaagaattcccagtaacttccttgagttgtgtgcattcaactcacagagatgaacattcccttagacagagcagatttgaatcactctatttgtgtaatttacaagtgtagatttcaagcgctttaaggtcaatggcagaaaaggaaacatcttcgtttcaaaactagacagaatcattcccacaaactgcgttgtgaggtgttcgttcaactcacagagtttaacctttcttttcatagagcagttaggaaacagtctgtttgtaaattctgtaagtggatattctgacatcttgtggccttcgttggaaacgggatttcttcatattctgctagacagaagaattctcagtaacttccttgtgttgtgtgttttcaactcacaagagttgaacgatcctttacacagagcagacttgaaacactccttttgtggaatttgcaagtggagatttcagccgctttgaggtcaatggtagaataggaaatatcttcctatagaaactagacagaatcattctcagaaactcctttgtgatgtgtgtgttcaactcacagagtttaacctttcttttcatagagcagttagtaaacactctgtttataaagtctgcaagtggatattcagacccctttgaggccttcgttggaaacgggatttcttcatattattctagacagaagaattctcagtaacttccttgtgttgtgtgtattcaactgacagagttgaactttcatttagagagagcagatttgaaacacagtttttgtggaatttgcaagtggagatttcaagcgctatggggccaaaggcagaaaaggaaatatattcgtataaaaactagacagaatcattctcagaaactgctctgtgatgtgtgcgttcaactctcagagtttcacttttcttttcattcagcattttggaaatactctgtttgtaaagtctgcacgtggatattttgaccacttagaggccttcgttggaaacgggtttttttcatgtaaggctagacagaagaattcccagtaacttccttgtgttgtgtgcattccactcacagagttgaacgttcccttagacagagcagatttgaaacactctatttgtgcaatttgcaagtgtagatttcaagcgctttaaggtcaatggcagaaaaggaaatatcttcgtttcaaaactagacagaatcattcccacaaactgcgttgtgatgtgttcgttcaactcacagagtttaacctttctgttcatagagcagttaggaaacactctgtttgtaaagtctgtaagtggatattctgacatccttgtggccttcgtttgaaaagggatttcttcatattctgctagacagaagaattctcagaaacttccttgtgttgtgtgatttcaactcacagagttgaacgatcctttacacagagcagacttgaaacactctttttgtggaatttgcaagtggagatttcagccgctttgaggtcaatggtagaataggaaatatcttcctatagaaactagacagaatgattctcagaaactcctttgtgatgtgtacgttcaactcacagagtttaacctttcttttcatagagcagttaggaaacactctgtttgtaaagtctgcaagtggatattcagacctctttgaggccttcgttggaaacgggtttttttcatataaggctagacagaagaattctcagtaacttccttgtgttgtgtgtattcaactgacagagttgaactttcatttagagagagcagatttgaaacactgtttttgtggaatttgcaagtggagatttcaagcgctttgtggccaaaggtagaaaaggaaatatcttcgtataaaaactagacagaatcattctcagaaactgctgcgtaatgtgtgcgttcaactctcagagtttaacttttcttttcattcagcggtttggaaacactctgtttctaaagtctgcacgtggaaattttgaccatttagaggccttcgttggaaacgggtttttttcatgtaaggctagacagaagaattcccagtaacttccttgtgttgtgtgcattcaactcacagagttgaacgttcccttagacagaccagatttgaaacactctatttgtgcaatttgcaagtgtagatttcaagcgctttaaggtcaatggcagaaaaggaaatatcgtcgtttcaaaactagacagaatcattcccacaaactgcgttgtgatgtgttcgttcaactcacagagtttaacctttctgttcatagagcagttaggaaacactttctttgtaaagtctgtaagtggatattctgatatcttgtggccttcgttggaaacgggatttcttcatattctgctagacagaagaattctcagtaacttccttgtgttgtgtgtattcaactcacagagttgaacgatcctttacacagagcagacatgaaacactctttttgtggaatttgcaagtggagatttcagccgctttgaggtcaatggtagaaaaggaaatatcttcgtataaaaactagacagaatgattctcagaaactcctttgtgatgtgtgcgttcaactcacagagttcaacctttcttttcatagagcagttgggaaacactctgtttgtaaagtctgcaagtggatattcagacttctttgaggccttccttggaagcgggatttcttcatattcagctagacagaagaattctcagtaacttccttgtgttgtgtgtattcaactcacagagttgaacgatgctttacacagagcagacttgaaacactctttttgtggtatttgcaagtggagatttcagccgctttgaggtcaatgttagaaaaggaaatatcttcgtataaaaactagacagaatcattctcagaaactgctctgcgatgtgtgtgttcaactctcagagtttaacttttcttttcattcagcagtttggaagcactctgtttgtgaagtctgcacgtggatattttgaacacttagaggccgtctttggaaacgggtttttttcctgtaaggctagacagaagaattcccagtaacttccttgtgttgtgtgcattcaactcacagagttgaacgttccttagacagagcagatttgaaacactctattcgtgcaatttgcaagtgtagatttcaagcgctttaaggtcaatggcagaaaaggaaatatcttcgtttcaaaactagacagaatcattcccacaaactgcgctgtgatgtgttcgttcaactcacagagtttaacctttctgttcatagagcagttaggaaacactctgtttgtaaagtctgtaagtggatattctgacattttgtggccttcattggaaatgggatttcttcatattctcctagacagaagaattctcagtaacttccttgtgttgtgtgtattcaactcacagagttgaacgatcctttacacagagcagacttgtaacactctttttgtgtaatttgcaagtggagatttcagccgctttgaagtcaaaggtagaaaaggaaatatcttcctataaaaactagacagaatgattctcagaaactcctttgtgatgtgtgcgttcaactcacagagtttaacctttcttttcatagagcagttaggaaacactctgtttgtaaagtctgcaagtggatattcagacgtctttgaggccttcgttggaaacgggtttttttcatataaggctagacagaagaactcccagtaacttccttgtgttgtgtgtgttcaactcacagagttgaactttcctttacacagagcagatttgaaacactctttttgtggaatttgcaaatggagatttcagccgcgttgaggtcaatggtagaaaaggaaatatcttcgtttcaaaactagacagaatcattctcagaaactgctctgcgatgtgtgctttcaactctcagagtttaacttttcttttcattcagcagtttggaaacactctgtttgtaaagtctgcacgtggatattttgaccacttagaggccttcgttggaaacgggtttttttcctgtaaggctagacagaagaattcccagtaacttccttgtgttgtgtacattcaactcacagagttcaacgttcccttagacagagcagatttgaaacactctttttgtgcaattggcaagtggtgatttcagccgctttgaggtcaatggtagaaaaggaaatatcttcgtataaaaactagacagaatcattcccacaaactgcgttgtgatgtgttcgttcaactcacagagtttaacctttcttttcatagagcagttaggaaacagtctgtttgtaaattttgtaagtggatattctgacatcttgtgcccttcgttggaaacgggatttcttcatattctgctagacagaagaattctcagaatcttccttgtgttgtgtgtattcaactcacacagttgaacgatactttacacagagcagacttgaaacgctctttttgtggaatttgcaagtggagatttcagccgcgttgaggtcaatggtagaaaaggaaatatcttcgtataaaaactagacagaatgattctcagaaactcctttgtgatgtgtgcgttcaactcacacagtttaacctttcttttcatagagcagttaggaaacactctgtttgtaaagtctgcaggtggatattcagacctccttgaggcattcgttggaaacgggatttcttcatattatgctagacagaagaattcccagtaacttccttgtgttgtgtgtgttcaactcacagagttaaactttcatttacccagagcagatttgaaacactctttttgtggaatttgcaagtggagatttcaagcgctttgaggccaaaggcagaaaaggaaatatcttcgtttcaaaactagacagaatcattctcagaaactgctgcgtgatgtgtgcgttcaactctcagagtttaacttttcttttcattcagcggtttggaaacattctgtttgtaaagtctgcacgtggatattttgaccacttagaggccttctttggaaacgggtttttttcatgtaaggctagacagaagaattcccagtaacttccatgtgttgtgtgcattcaactcacagaattgaacgttcccttagacagagcagatttgaaacactctatttctgcaatttgcaagtgtagatttcaagcgctttaaggtcaatggcagaaaaggaaatatcttcgtttcaaaactagacagaatcattcccacaaactgcgttgtgatgtgttcgttcaactcacagggtttaacctttcttttcatagagcagttaggaaacagtctgtttgtcatttctgtaagtggatattctgacatcttgtggccttagttggaaacgggatttcttcatattctgctagacagaataattctcagtaacttccttgtgttgtgtgtattcaactcacagagttgaaggatcctttacagagagcaggcttgaaacactgtttttgtcgaatttgcaagtggagatttcagccgctttgaggtcaatggtagaataggaaatatcttcttatagaaactagacagaatgattctgagaaagtcctttgtgatgtgtgcgttcaactcacagagtttaaccttttttttcatagagcagttaggaaacactctgtttgtaaagtctgcaagtggatattcagacctctttgaggccttcgttggaaatgggatttcttcatattatgctagacagaagaattcccagtaacttccttgtgttgtgtgtgttcaactcacagagttgaactttcatttacacagagcagatttgaaactctctttttgtggaatttgcaagtggagatttcaagcgctttgaggccaaaggcagaaaaggaaatatcttcgtttcaaaactagacagaatcattatcagaaactgctgcgtgatgtgtgcgttcaactctcagagtttaacttttcttttcattcagcggtttggaaacactctgtttgtaaagtctgcacgtggatattttgaccacttagaggccttcgttggaaacgggtttttttcatgtaacgctagacagaagaattcccaggaacttccttgtgttgtgtacattcaactcacagagttgaacgttcccttagacagagcagatttgaaacactctttttgtgcaattggcaagtggtgatttcagccgctttgaggtcaatggtagaaaaggaaatatcttcgtataaaaactagacagaatgattctcagaaactcctttgagatgtgtgcgttcaactcatagagtttaacttttcttttcatagagcagttaggaaacactctgtttgtaaagtctgcaggtggatattcagacctctttgaggccttcgttggaaacgggatttcttcatattctgctagacagaagaattctcaataacttccttgtgttgtgtgtattcaactcacagagttgaacgatcctttacacagagcagacttgaaacactctttttgtggaatttgcaagtggagatttcagccgctatgaggtcaatagtagaaaaggaaatatcttcgtagaaaaactagacagaatgattctcagaaactcctttgtgatgtgtgcgttcaactcacagagtttaacctttcttttcatagagcagttaggaaacactctgtttgtaaagtctgcaagtggatattcagacatcctagaggctttcgttggaaacgggatttcttcatattctgctatacagaagaattcccagtaacttccttgtgttgtgtgtgttcaactcacagagttgaactttcatttacccagagcagatttgaaacactctttttgtggaatttgcaagtggagatttcaagcgctttgaggccaaatgcagaaaaggaaatatcttcgtttcaaaactagacagaatccttctcagaaactgctgcgtgatgtgtgcgttcaactctcagagtttaacttttcttttcattcagcggtttggaaacactctgtttgtaatgtctgcacgtggataatttgaccacttagaggccttcgttggaaacgggttttttgcacgtaaggctaggcagaagaattcccagtaacttcccttgtgttgggtgcattaaactcacagagttgaacgttcccttagacagagcagatttgaaacactctatttgtgcaatttgcaagtgtagatttcaagcgctttaaggtcaatggcagaaaaggaaatatcttcgtttcaaaactagacagaacgtttctcagaaactcctttgtgatgtgtgcgttcaactcacagagtttaacctttcttttcatagagcagttaggaaacactctgtttgtaaagtctgcaagtggatattcagacctccttgaggccttcgttggaaacgggatttcttcatattctgctagacagaagaattctcagtaacttccttgtgttgtgtttattcaactcacagagttgaatgatcctttacacagagcagacttgaaacactctttttattgaatttgcaagtggagatttcagccgctttgaggtcaatggtagaaaagtaaatatcttcgtataaagactagacagaatgattctcagaaactcctttgtgatgtgtgcgttcaactcacagagtttaacgtttcttttcatagagcagttaggaaacactctgtttgtaaagtctgcaagtggatattcagacatctttgaggccttcgttggaaacgggatttcttcatgttctgctagacagaagaattcccagtaacttccttgtgttgtgtgtgttcaactcacagagttgaactttcatttacacagagcagatttgaaacactctttttgtggaatttgcaagaggagatttcaagcgctttgaggccaaagacagaaaaggaaatatcttcgtataaaaactagacagaatcattctcagaaactgctgcgtgatgtgtgcgttcaactctcagagtttaacttttcttttcattcagcggtttggaaacactctgtttgtaaagtctgcacgtggatattttgaccacttagaggccttcgttcgaaacgggattttttcatgtaaggctagacagaagaattcccagtaacttccttgtgttgtgtacattcaactcacagagttgaacgttcccttagacagagcagatttgaaacactctttttgtgcaattggcaagtggagatttcaagcgctttaagttcaatggcagaaaaggaaatatcttcgtttcaaaactagacagaatcattcccacaaactgcgttgtgaggtgttcgttcaactcacagagtttaacctttcttttcatagagcagttaggaaacagtctgtttgtaaattctgtaagtggatattctgacatcttgtggccttcgttggaaacgggatttcttcatattctgctagacagaagaattctcagtaacttccttctgttgtgtttattcaactcacagagttgaatgatcctttacacagagcagacttgaaacactctttttgtggaatttgcaagtggaggtttcagccgctttgaggtcaatggtagaaaagtaaatatcttcgtataaagactagacagaatgattctcagaaactcctttgtgatgtgtgcgttcaactcacagagttcaacctttcttttcatagagcagttgggaaacactctgtttgtaatgtctgcaagtggatattcagacttctttgaggctttcgttggaagcgggatttcttcatattctgctagacagaagaattctcagtaacttccttgtgttgtgtgtattcaactcacagagttgaacgatcctttacacagagcagacttgaaacactctttttgtggaatttgcaagtggagatttcaagcgctttggggccaaaggcagaaaaggaaatatcttcgtataaaaactagacagaatcattctcagaaactgctgtgtgatgtgtgcgttcaactctcagagtttaacttttcttttcattcagcggtttggaaacactctgtttgtaaagtctgcacgtggatattttgaccacttagaggccttcgttggaaacgggtttttttcatgtaaggctagacagaagaattcccagtaacttccttgtgttgtgtgcattcaactcacagagatgaacgttcccttagacagagcagatttgaaacactctatttgtgcaatttgcaagtgtagttttcaagctctttaaggtcaacggcagaaaaggaaatatcttggtttcaaaactagacagaatcattgtcacaaactgcgttgtgatgtgttcgttcaactcacagagtttaacctttcttttcatagagcagttaggaaacactctgtttgtaaagtctgcaagtggatattcagacatctttgaggctttctttggaaacgggatttcttcatattcttctagacagaagaattctcagtaactttccttgtgttgtgtgcattcaactcacagagttgaacgatcctttacacagagcagacttgagacactctttttgtggaatttgcaagtggagatttcagccgctttgaggtcaatggtagaaaaggaaatatcttcgtataaaaactagacagaatgattctcataaactcctttgtgatgtgtgcgttcaactcacagagtttaacttttcttttcatagagcagttaggaaacactctgtttgtaaagtctgcaagtggatattcagacctccttgaggccattcgttggaaacgggatttcttcatattctgctagacagaagaattcccagtaacttccttgtgttgtgtgtgttcaactcacagagttgaactttcatttacacagagcagatttgaaacactctttttgtggaatttgcaagtagagatttcaagcgctttgaggccaaaggcagaaaaggaaatgtattcgtataaaaactagacagaatcattctcagaaactgctctgcgatgtgtgcgttcaactctcagagtttaacttttcttttcattcagcagtttggaaacactctgtttgtaaagtctgcaagtggatattcagacctctttgaggccttcgttggaaacgggttttttacatataaggctaaacagaagaattcccagtaacttccttgtgttgtgtgcattcaactcacagagttgaacgttcccttagacagagcagatttgaaacactctatttgtgcaatttgcaagtgtagatttcaagcgctttaaggtcaatgggagaaaaggaaatatcttcgtttcaaaactagacagaatcattcccacaaactgcgttgtgatgtgttcgttcaacttacagagtttaacatttctgttcatagagcagttaggaaacactctgtttgtaaagtctgtaagtggatattcagacatcttgtggccttcgttggaaacgggatttcttcctattctgctagacagaagaattctcagtaacttccttgtgttgtgtgtactcaactcacagagttgaaggatcctttacagagagcaggcttgaaacactctttttgtcgaatttgcaagtggagatttcagccgctttgaggtcaatggtagaataggaaatatcttcttatagaaactagacagaatgattatcagaaaatcctttgtgatgtgtgcgttcaactcacagagtttaacttttcttttcatagagcagttaggaaacactctgtttgtaaagtctgcaagtggatattcagacctctttgaggccttcgttggaaacgggatttcttcatattatgctagacagaagaattctcagtaacttccttgtgttgtgtgtattcaactgacagagttgaactttcatttagagagagcagatttgaaacactgtttttgtggaatttgcaagtggagatttcaagcgctttggggccaaaggcagaaaaggaaatatcttggtataaaaactagacagaatcattctcagaaaatgctctgcgatgtgtgcgttcaactctcagagtttaacttttcttttcattcagcagtttggaaacactctgtttgtaaagtctgcacgtggataatttgatcacttagaggccttcgttggaaacggctttttttcatgtaaggctagacagaagaattcccagtaacttccttgtgttgtgtgcattcaactcacagagttgaacgttcccttagacagagcagatttgaaacactctatttgtccaatttgcaagtgtagatttcaagcgctttaaggtcaacggcagaaaaggaaatatcttcgtttcaaaactagacagaatcattcccacaaactgcgttgtgatgtgttcgttcaactcacagagtttaacctttcttttcatagagcagttaggaaacagtctgtttgtaaattctgtaagtggatattctgacatcttgtggccttggttggaaacgggatttcttcatattctgctagacagaagaattctcagtaacttccttgtgttgtgtgtattcaactcacagagttgaactatcctttacacagagcagacttgtaacactctttttgtggaatttgcaagtggagatttcagccgctttgaagtcaaagtagaaaaggaaatatcttcctataaaaactagacagaatgattctcataaactcctttgtgatgtgtgcgtccaactcacagagtttaacctttcttttcatagagcagttaggaaacactctgtttgtaaagtctgcaagtggatattcagacctccttgaggccttcgttggaaacgggatttcttcatattctgctagacagaagaattctcagtaacttccttgtgttgtgtgtattcaactgacagagttgaactttcatttagagagagcagatttgaaacactgtttttgtggaatttgcaagtggatatttcaagcgctttggggccaaaggcagaaaacgaaatatcttcgtataaaaactagacagaatcattctcagaaactgctgcgtgatgtgtgcgttcaactctcagagtttaacttttcttttcattcagcggtttggaaacactctgtttgtaaagtctgcacgtggacattttgaccacttagaggtcttctttggaaacgggtttttttcatgtaaggctagacagaagaattcccagtaacttccttgtgttgtgtgcattcaactcacagagttgaacgttcccttagacagagcagatttgaaacactctatttgtgcaatttgcaagtgtagatttcaagcgctttaaggtcaatggcagaaaaggaaatatcttagtttcaaaactagacagaatcattctcacaaactgcgttgtgatgtgttcgttcaactcacagagtttaacctttcttttcatagagcagttaggaaacagtctgtttgtcaattctgtaagtggatattctgacatcttgtggccttcgttggaaacgggatttcttcatattctgctagacagaagaattctcagtaacttccttgtgttgtgtgtattcaactcacagagttgaacgatcctttatagagagcagactttaaacactctttttgtggaatttgcaagtggagatttcagccgctttgaggtcaatggtagaaaaggaaatatcttcgtataaagactagacagaatgattctcagaaactcctttgtgatgtgtgcgttcaactcacagagtttaacctttcttttcatagagcagttaggaaacactctgtttgttaagtctgcaagtggatattcagacctctttgaggccttcgttggaaacgggttttcttcatattatgctagacagaagaattcccaagtaacttccatgtgttgtgtgtgttcaactcacagagttgaactttcatttacacagagtagatttgaaacactctttttgtggaatttgcaaatggagatttcaaactctttgaggccaaaggcagaaaaggaaatatcttcgtataaaaactagacagaaatcattctcagaaactgctctgcgatgtgtgcgttcaactctcagagtttaacttttcttttcattcagcagtttggaaacactctgtttgtaaagtctgcacgtggataacttgaccacttagaggacttcgttggaaacgggtttttttcctgtaaggctagacagaagaattcccagtaacttccttgtgttgtgtacattcaactcacagagttgaacgttcccttagacagagcagatttgaaacactctttttgtgcaattggcaaatggagatttcaagcgctttaagttcaatggcagaaaaggaaatatcttcgtttcaaaactagacagaaatcattcccacaaactgcgttgtgatgtgttcgttcaactcacagagtttaacctttcttttcatagagcagttaggaaacagtctgtttgtcaattctgtaagtggatattctgacatcttgtggccttcgttggaaacgggatttcttcatattctgctagacagaagaattctcagtaacttccttgtgttgtgtgtattcaactcacagagttgaacgatcctttacacagagcagacttgaaacactctttttgtggaatttgcaagtggagatttcagccgatttgacgtcaatggtagaataggaaatatcttcctatagaaactagacagaatgattctcagaaactcctttgtgatgtgtgtgttcaactcacagagtttaacctttctgttcatagagcagttaggaaacactctgtttgtaaagtctgcaagtggatattcagacctccttgaggccttcgttggaaacgggatttcttcatattctgctagacagaagaattcccagtaacttccttgtgttgtgtgtgttcaactcacagagttgaactttcatttacacagagcagatttgaaacactctttttgtggaatttgcaaatggagatttcaagcgctttgaggccaaaggcagaaaaggaagtatcttcgtataaaaactagacagaatcattctcagaaactgctctgcgatgtgtgcgttcaactctcagagtttaactttgcttttcattcagcagtttggaaacactctgtttgtaaagtctgcacgtggataatttgaccacttagaggccttcgttggaaacgggtttttttcatgtaaggctagacagaagaattcccagtaacttccttgtgttgtgtgcattcaactcacggagttgaacgttcccttagagcagatttgaaacactctatttgtgcaatttgcaagtgtagatttcaagcgctttaaggtcaatggcagaaaaggaaatatcttcgtttcaaaactagacagaatcattcccacaaactgcgttgtgatgtgttcgttcaactcacagagtttaacctttctgttcatagagcagttaggaaacactctgtttgtaaagtctgcaagtggatattcagacctcctagaggccttcgttggaaacgggatttctccatattctgctagacagaataattctcagtaacttccttgtgttgtgtgtattcaactcacagagttgaacgatcctttacacagagcagacttgaaacactctttttgtggaatttgcaagtggagatttcagccgctttgaggtcaatggtagaaaaggaaactatcttcgtataaagacaagacagaatgattctgagaaactcctttgtgatgtgtgcgttcaactcacagagtttaacctttcttttcatagagcagttaggaaacactctgtttgtaaagtctgcaagtggatattcagacctccttgaggccttcgttggaaacgggatttcttcctattatgctagacagaagaattctcagtaacttccttgtgttgtgtgtattcaactcacagagttgaatgatcctttacacagagcagacttgaaacactctttttgtggaatttgcaagtggagatttcagccgttttgagttcaatggtagaataggaaatatcttcctatagaaactagacagaatcattctcagaaactgctctgcgatgtgtgcgttcaactctcagagtttaacttttcttttcattcagcagtttggaaacactctgtttgtaaagtctgcacgtggataatttgaccacttagagaccttcgttggaaacgggtttttttcatgtaaggctagacagaagaattctcagtaacttccttgtgttgtgtgtattcaactcacagagttgaacgatcctttacacagagcagacttgaaacactctttttgtggaatttccaagtggagatttcagccgctatgtggtcaatggtagaatagcaaatatcttcctatagaaactagacagaatgattctcagaaactcctttgtgatgtgtgcgttcaactcacagattttaaccgttcttttcatagagcagttaggaaacactctgtttgtaaagtctgcaagtggatattcagacctctttgaggccttcgttggaaatgggatttcttcatattctgctagacagaagaattctcagtaacttccttgtgttgtgtgcattcaactcacagagttgaacgatcctttacacagagcagacttgaaacactcttttcgtggaatttgcaagtggagatttctgccgctttgaggtcaattgtagaataggaaatatcttcctgtagaaactagacagaatgattctcagaaactcctttgtgatgtgtgcgttcaactcacagactttaacctttcttttcatagagcagttaggaaacactctgtttgtaaagtctgcaagtggatattcagacctctttgaggccttcgttggaaacgggtttttttcatataaggctagacagaaagaattcccagtaacttccttgtgttgtgtgtgttcaactcacagagttgagctttcatttacacagagcagatttgaaacactctttttgtggaatttgcaagtggagatttcaagcgctttgaggccaaaggcagaaaaggaaatatcttcgtataaaaactagacagaatcattctcagaaactgctctgcgatgtgtgcgttcaactctcagagtttaacttttgttttcattcagcagtttggaaacactctgtttgtaaagtctgcacgtggataatttgaccacttagaggccttcgttggaaacgggtttttttcatgtaaggctagacagaagaattctcagtaacttccttgtgttgtgtgtattcaactgacagagttgaactttcatttagagagagcagatttgaaacactgtttttgtggaatttgcaattggagatttcaagcactttggggccaaaggcagaaaaggaaatatcttcgtttcaaaactagacagaatcattcccacaaactgcgttgtgatgtgtttgttcaactcacacagtttaacctttctgttcatagagcagttaggaaacactctgtttgtaaagtctgcaagtggatattcagacctccgtgaggccttcgttggaaacgggatttcttcatattctgctagacagaagaattctcagtaacttccttgtgttgtgtgtattcaactcacagagttgaacgatcctttacacagagcagacttgaaacactctttttgtggaatttgcaagtgcagatttcagccgctttgaggtcaatggtagaataggaaatatcttcctatagaaactagacagaatgattctcagaaactcctttgtgatgtgtgcgttcaactcacagagtttaacctttcttttcatagagcagttaggaaacactctgtttgtaaagtctgtaagtggatattcagacatccttgaggctttcgttggaaacgggatttcttcatattctgctagaaagaagaattctcagtaacttccttgtgttgtgtgtattcaactcacagagttgaatgatcctttacacagaacagtcttgaaacactctttttgtggaatttgcaagtggagatttcagccgctttgaggtcaacggtagaataggaaatatcttcctatagaaactagacagaatcattctcagaaactgctctgcgatgtgtgcgttcaactctcagagtttaacttttcttttcattcagcagtttggaaacactctgtttgtaaagtctgcacgtggatattttgaccacttagaggctcttcgttggaaacgggtttttttcctgtaaggctagacagtagaattcccagtaacttccttgtgttgtgtacattcaactcacagagttgaacgttcccttagacagagcagatgtgaaacactctttttgtgcaattggcaagtggagatttcaagcgctttaaggtcaatggcagaaaaggaaatatcttcgtttcaaaactagacagaatcattcccacaaactgcgttgtgatgtgttcgttcaactcaccagagtttaacctttcttttcatagagcagttaggaaacactctgtttgtaaattctgtaagtggatattctgacatcttgtggccttcgttggaaacgggatttcttcatattctgctagacagaagaattctcggaatcttccttgtgttgtgtgtattcaactcacagaattgaacgatggtttacacagagcagatttgaaacactctttttgtggaatttgcaagtggagatttcagccgctttgaggtcaatggtagaaaaggaaatatcttcgtataaaaactagacagaatgattctcagaaacttctttgtgatgtgtgcgttccactcacagagtttaacctttcttttcatagagcagttaggaaacactctgtttgtaaactctgcaagtggatattcagacctctttgaggccttcgttgcaaacgggatttcttcatattatgcctgagagaagaattctcagtaacttccttgtgttgtgtgtattcaactgacagagttgaactttcatttagagagagcagatttgaaacactgtttttgtggaatttgcaagtggagatttcaagcgctatggggccaaaggcagaaaaggaaatatctttgtataaaaactagacagaatcattctcagaaactgctctgcgatgtgtgtgttcaactctcacagtttaacttttcttttcattcagcagtttggaaacactctgtttgtaaagtctgcacgtggataatttgaccacttagaggccttcgttggaaacgggtttttttcatgtaaggctagacagaagaattcccagtaacttccttgtgttgtgtacattcaactcacagagttgaacgttcccttagacagagcagatttgaaacactctttttgtgaaattggcaagtggtgatttcaagcgctttaaggtcaatggcagaaaaggaaatatcttcgtttcaaaactagacagaatcattcccacaaactgcgttgtgaggtgttcgttcaactcacagagtttaacctttcttttcatagagcagttaggaaacagtctgtttgtaaattctgtaagtggatattctgacatcttgtggccttagttggaaacgggatttcttcatattctgctagacagaagaattctcagtaactttccttgtgttgtgtgtattcaactcacagagttgaacgatcctttacacagagcagacttgtaacactctttttgtggaattcgcaagtggagatttcagcagctttgaagtcaaaggtagaaaaggaaatatcttcctataaaaactagacagaatgattctcagaaacttctttgtgatgtgtgcgttcaactcacagaatttaacctttcttttcatagagcagttaggaaacactctgtttgtaaactctgcaagtggatattcagacctgtttgaggccttcgttggaaacgggatttcttcatactatgctagacagaagaattctcagtaacttccttgtgttgtgtgtattcaactcacagagttgaacgatcctttacacagagcagacttgtaacactctttttgtggaatttgcaagtggagatttcagccgctttgacgtcaaaggtagaaaaggaaatatcttcctatacaaactagacagaatcattctcagaaactgatctgtgatgtttgcgttcaactctcagagtttaacttttcttttcattcagcagtttggaaacactctgtttgtgaagtctgcacgtggataatttgaccactttgaggccttcgttggaaacgggtttttttcctgtaaggctagacagaagaattctcagaaacttccttgtgttgtgtgttttcaaatcacagagttgaacgatgctttacacagagtagacttgaaacactctttttgtgtaatttgcaagtggagatttcagccgctttgaggtcaatggtagaaaaggaaatatcttcgtataaaaattagacagaatgattctcagaaactcctttgtgatgtgtgcgttcaactcacagagtttaacctttcttttcatagagtagttaggaaacactctgtttgtaaagtctgcaagtggatattcagacctccttgagaccttcgttggaaacgggatttcttcatattatgctagacagaagaattctcagtaacttccttgtgttgtgtgtattcaactcacagagttgaacgatcctttacacagagcagacttgaaacactctttttgtggaatttgcaagtggagatttcagccgctttgaggtcaacggtagaataggaaatatcttcctatagaaactagacagagtgattctcataaactcctttgtgatgtgtgcgttcaactcacagagtttaacctttcttttcatagagcagttaggaaacactctgtttgtaaagtctgcaagtggatattcagacctccttgaggccttctttggaaacgggatttcttcatattctgatagacagaagaattctcagaaacttccttgtgttgtgtgttttcaactcacagagatgaacgatcctttacacagagcagacttgaaacactccttttgtggaatttgcaagtggagatttcagccgctttgagttcaatggtagaataggaaatatcttcctatagaaagtagacagaatgattctcagaaactcctttgtgatgtgtacgttcaactcacagagtttaacctttcttttcatagagcagttaggaaacactctgtttgtaaagtctgcatgtggatattgagacctctttgaggccttcgttggaaacgggtttttttcatataaggctagacagaagaattcccagtaacttccttgtgttgtgtgtgttcaacttacagagttgaactttcatttacacagagcagatttgaaacactctttttgtggaatttgtaagtggagatttcaagcgctttgaggccaaaggcagaaaaggaaatatcttcgtataaaaactagacagaatcattctcagaaactgctgtgtgatgtgtgcgttcaactctcagagtttaacttttcttttcattcagcggtttggaaacactctgtttgtaaagtctgcacgtggatattttgaccacttagaggccttcgttggaaacgggtttttttcatgtaaggctagacagaagaattcccagtaacttccttgtgttgtgtgcattcaactcacagagttgaacgttcccttagacacagcagatttgaaacactctatttgtgcaatttgcaagtgtagatttcaagcgctttaaggtcaatggcagaaaaggaaatatcttcgtttcaatactagacagaatcattcccacaaactgcgttgtgatgtgttcgttcaactcacagagtttaacctttcttttcatagagcagttaggaaacactctgttggtaaattctgtaagtggatattctgacatccttgtggccttcagtggaaacgggatttcttcatattctgctagacagaagaattctcagaatcttccttgtgttgtgtgtattcaactcacacagttgaacgattgtttacacagagcagatttgaaacactctttctctggaatttgcaagtggagatttcagccgctttgaggtccatggtagaaaaggaaatatcttcgtataacaactagacagaatgattctcagaaactcctttgtgatgtgtgcgttcaactcacagagtttaacctttctattcatagagcagttaggaaacactctgtttgtaaagtctgcaagtggatattcagacctctttgaggccttcgttggaaacgggtttttttcatataaggctagacagaagaattcccagtaacttccttgtgttgtgtgtgttcaactcacagagttgaactttgatttacacagagcagatttgaaacactctttttgtggactttgcaagtggagatttcaagcgctttgaggccaaaggcagaaaaggaaatatcttcgtttcaaaactagacagaatcattctcagaaactgctctgcgatgtgtgcgttcaactctcagagtttaacttttcttttcattcagcagtttggaaacactctgtttgtaaagtctgcacgtggatattttgaccacttagaggccttcgttggaaacgggttttttcctgtaaggctagacagaagaattcccagtaacttccttgtgttgtgtacattcaactcacagagttgaacgttcccttagacagagcagatttgaaacactctatttgtgcaattggcaagtggagatttcaagcgctttaaggtcaatggcagaaaaggaaatatcttcgtttcaaaactagacagaatcattcccacaaactgcgttgtgatgtgttcgttcaactcacagagtttaacctttcttttcatagagcagttaggaaacactctgttggtaaattctgtaagtggatattctgacatcttgtggccttcgttggaaacaggatttcttcatattctgctacacagaagaattctcagtaacttccttgtgttgtgtgtattcaactcacagagttgaacgatcctttacacagagcagacttggaacactctttttgtggaatttgcaagtggagatttcagccgctttgaggtccatggtagaaaaggaaatatcttcgtataaaaactagacagaatgattctcagaaactcctttgtgatgtgtgcgttcaactcacagagtctaacctttcttttcatagagcagttaggaaacactctgtttgtaaagtctgcaagtggatattcagacatctttgaggctttcgttggaaacgggatttcttcatattctgctagacagaagaattctcagtaacttccttgtgttgtgcgtattcaactgacagagttgaactttcatttagagagagcagatttgaaacactgtttttgtggaatttgcaagtggagatttcaagcgctttggggccaaaggcagaaaacgaaatatcttcgtataaaaactagacagaaatcattctcagaaaactgctgcgtgatgtgtgcgttcaactctcagagtttaacttttcttttcattcagcggtttggaaacactctgtttgtaaagtctgcacgtggatattttgaccacttagaggccttcgttggaaacgggtttttttcatgtaaggctagacagaagaattcccagtaacttccttgtgttgtgtacattcaactcacagagttgaacgttcccttagacagagcagatttgaaacactctttttgtgcaattggcaagtggagatttcaagcgctttgaggtcaatggcagaaaaggaaatatcttcgtttcaaaactagacagaatcattcccaaaaattgcgttgtgatgtgttcgttaaactcacagagtttaacctttctgttcatagagcagttaggaaacactctgtttgtaaagtctgtaagtggaaattctgacatcttgtggccttcgttggaaacgggatttcttcatattatgctagacagaagaattctcagaaacttccttgtgttgtgtgttttcaactcacagagttgaacgatcctttacacagagcagacttgaaacactccttttgtggaatttgcaagtggagatttcagccgctttgaggtcaatggtagaaaaggaaatatcttcgtataaaaactagacagaatgattctcataatctcctttgtgatgtgtccgttcaactcacagagtttaaccttccttttcatagagcagttaggaaacactctgtttgtaaagtctgcaagtggatattcagacctccttgaggccttcgttggaaacgggatttcttcatattctgctagacagaagaattcccagtaacttccttgagttgtgtgtggtcaactcacagagttgaactttcatttacacagagcagatttgaaacactctttttgtataatttgcaaatggagatttcaagcgctttgaggccaaaggcagaaaaggaaatatcttcttataaaaactagacagaatcattctcagaaactgctctgcgatgtgtgcgttcaactctcagagtttaacttttcttttcattcagcagtttggaaacactctgtttgtaaagtctgcacgtggatattttgaccacttagaggccttcgttggaaacgagtattttttcctgtaaggctagacagaagaattcccagtaacttccttgtgttgtgtacattcaactcacagagttgaacgttcccttagacagagcagatttgaaagactctttttctgcaattggcaaatggagatttcaagcgctttaaggtcaatggcagaaaaggaaatatcttcgtttcaaaactagacagaatgattctcataaactcctttgtgatgtgtgcgttcaactcacagagtttaacttttcttttcatagagcagttaggaaacactctgtttgtaatgtctgcaagtggatattcagacctccttgaggccttcgttggaaacgggatttcttcatattctgctagacagaagaattctcagtaacatccttgtgttgtgtgtattcaactcacagagttgaacgatcctttacacagagcagacttgaaacactctttttgttgaatttgcaagtggagatttcagccgctttgaggtcaatggtagaaaaggaaatatcttcgtataaaaactagacagaatgattctcagaaactcctttgtgatgtgtgcgttcatctcacagagtttaacttttcttttcatagagccgttaggaaacactctgtttgtaaagtctgcaagtggatattcagacctctttgaggccttcgttggaaacgggatttcttcatattatgctagacagaagaattcccagtaacttccatgtgttgtgtgtgttcaactcacagagttgaactttcatttacacagagcagatttgaaacactctttttgtggaatttgcaaatggagatttcaagcggtttgaggccaaaggcagaaaaggaaatatcttcgtataaaaactagacagaatcattctcagaaactgctgcgtgatgtgtgcgttcaactctcagagtttaacttttcttttcattcagcggtttggaaacactctgtttgtaaagtctgcacgtggatattttgaccacttagaggccttcgttggaaacgggttttttcatgtaaggctagacagaagaattcccagtaacttccttgtgttgtgtgcattcaactcacagagttgaacgttcccttagacagagcagatttgaaacactctatttgtgcaatttccaagtgtagatttcaagcgctttaaggtcaacggcagaaaaggaaatatcttcgtttcaaaactagacagaatcattcccacaaactgcgttgtgatgtgttcgttcaactcacagagtttaacctttgtgttcatagagcagttaggaaacactctgtttgtaaagtctgtaagtggatatactgacatcttgtggccttcgttggaaaccggatttcttcatattctgctagacagaagaattctcagtaacttccttgtgttgtgtgtattaaactcacagggttgaacgatcctttaaacagagcagacttgaaacactctttttgtggaatttgcaagtggagatttcagccgctttgaggtcaatggtagaaaaggaaagtatcttcgtataaagactagacagaatgattctcagaaactcctttgtgatgtgtgtgttcaactcacagagtttaacctttcttttcatagagcagttaggaaacactctgtttgtaaagtctgcaagtggatattcagacctctttgaggccttcgttggaaacgggtttttttcatatgaggctagacagaagaattcccagtaacttccttgtgttgtgtgtgttcaactcacagagttgaactttcatttacacagagcagattggaaacactctttttgtgaaatttgcaagtggagatttcaagtgctttgaggccaaaggcagaaaaggaaatatcttcgtataaaaactagacagaatcattctcagaaactgctctgcgatgtgtgctgttcaactctcagagtttaacttttcttttcattcagcagtttggaaacactctgtttgtaaagtctgcacgtggatattttgaccacttagaggccttcgttggaaacgggtttttttcctgtaaggctagacagaagaattcccagtaacttccttgtgttgtgtacattcaactcacagagttgaacgttcccttagacagagcagatttgaaacactctttttgtgcaattggcaagtggtgatttcagccgctttgaggtcaatggtagaaaaggaaatatcttcgtataaaaactagacagaatcattcccacaaactgcgttgtgatgtgttcgttcaactcacagagtttaacctttgtgttcttagagcagataggaaacactctgtttgtaaagtctgtaagtggatattctgacatcctgtggccttcgttggaaacgggatttcttcatattctgctagacagaagaattctcagtaacttccttatgttgtgtgtattcaactcacagagttgaactatcctttacacagagcagacttgaaacactctttttgtggaatttgcaagtggagatttcagccgctttgaggtcaatggtagaataggaaatatcttcctatagaaactagacagaatgattctcagaaactcctttgtgatgtgtgcgttcaactcacagagtttaacctttcttttcatagagcagttaggaatcactctgcttgtaaagtctgcaagtggatattcagccctctttgaggccttcgttggaaacgggtttttttcatataaggctagacagaagaattcccagtaacttccttgtgttgtgtgtgttcaactcacagagttgaactttcatttaaacagagcagatttgaaacactctttttgtggaatttgcaagtggagatttcaagcgctttgaggccaaaggtagaaaaggaaatatcttcgtttcaaaactagacagaatcattctcagtaaactgctctgcgatgtgtgcgttcaactctcagagtttaactttgcttttcattcagcagtttggaaacactctgtttgtaaagtctgcacgtggataatttgaccacttagaggccttcgttggaaacgggtttttttcatgtaaggctagacagaagaattcccagtaacttccttgtgttgtgtgcattcaactcacagagttgaacgttcccttagacagagcagatttgaaactctctatttgtgcaatttgcaagtgtagatttcaagcgctttaaggtcaatggcagaaaaggaaatatcttcgtttcaaaactagacagaatcattcccacaaactgcgttgtgatgtgttcgttcaactcacagagtttaacatttctgttcatagagcagttaggaaacactctgtttgtaaagtctgcaagtggatattcagacctccttgaggccttcgttggaaacgggatttcttcatattctgctagacagaagaattctcagtaacttccttgtgttgtgtgtattcaactcacagagttgaacgatcctttacactgagcagacttgaaacattctttttgtggaatttgcaagtggagatttcagccgctttgtggtcaatggtagaataggaaatatcttcctatagaaactagtcagaatgattctcagaaactcctttgtgatgtgtgcgttcaactcacagagtttaacctttcttttcatagagcagttagtaaacactctgtttggaaagtctgcaagtggatattcagacctctttgaggccttcgttggaaacgggatttcttcatattctgctagacagaagaattcccagtaactttcttgtgttgtgtgtgttcaactcacagggttgaactttcatttacacagagcagatttgaaacactctttttgtggaatttgcaaatggagatttcaagcgctttgaggccaaaggcagaaaaggaaatatcttcgtataaaaactagacagaatcattctcagaaactgctgcgtgatgtgtgcgttcaactctcagagtttaacttttcttttcattcagcggtttggaaacactctgtttgtaaagtctgcacgtggatattttgacctcttagaggccttcgttggaaacgggttttttttcatgtaaggctagacagaagaattctcagtaacttccttgtgttgtgtgtattcaactgacagagttgaactttcatttagagagagcagatttgaaacactctatttgtgcaatttgcaagtgtagatttcaagcgctttaaggtcaatggcagaaaaggaaatatcttcgttttaaaactagacagaatcattcccacaaactgcgttgtgatgtgttcgttcaactcacagagtttaacctttctgttcatagagcacttaggaaacactctgtttgtaaagtctgtaagtggatattctgacatcttgtggccttcgttggaaacgggatttcttcatattctgctagacagaagaattctcagaaacttccttgtgttgtgtgtattcaactcacagagttgaacgatcgtttacacagagcagacttgaaacactcttgttgtggaatttgcaagtggagatttcagccgctttgaggtcaatggtagaatagtaaatatcttcctaaagaaactagacagaatgattctcagaaactcctttgtgatgtgtgtgttcaactcacagagtttaacctttcttttcatagagcagttagtaaacactctgtttataaagtctgcaagtggatattcagacccctttgaggccttcgttggaaacgggatttcttcatattttgctagacagaagaattctcagtaacttgcttttgttgtgtgtattcaactgacagagttgaactttcatttagacagagcagaattgaaacactctttttctggaatttgcaagtggagatttcaagcgctttgaggccaaaggcagaaaaggatatatcttcgtataaaaactagacagaatcattctcagaaactgctctgcgatgtatgcgttcaactctcagagtttaacttttcttttcattcagcagtttagaaacactctgtttgtaaagtctgcacgtggatattttgaccacttagaggccttcgttggaaacgggtttttttcatgtaaggctagacagaagaattctcagtaacttccttgtgttgtgtgtattcaactcacagagttgaacgatcctttacacagagcagacttgaaacactctttttgtggaatttgcaagtggagatgtcagccgctttgtggtcaatggtagaataggaaatatcttcctatagaaactagacagaatgattctcagaaactcctttgtgatgtgtgcattcaacttacagagttcaacctttcttttcatagagcagttgggaaacactctgtttgtaaagtctgcaagtggatattcggacttatttgaggccttcgttggaagcgggatttcttcatattctgctagacagaagaattctcagtaacttccttgtgttgtgtgtattcaactcacagagttgaacgatcctttacacagagcagacttgaaacactctttttgtggaatttgcaagtggagatttcagccgctttgaggtcaatggtagaataggaaatatcttcctataggaaactagacagaatgattctcagaaactcctttgtgatgtgtgcgttcaactcacagagttcaacctttcttttcatagagcagttgggaaacactctgtttgtaaagtctgcaagtggatattcagacatccttgaggctttcgttggaaacgggatttcttcatattatgctagaaagaagaattctcagtaacttccttgtgttgtgtgtattcaactgacagagttgaactttcatttagagagagcagatttgaaacactgatttgtgaaatttgcaagtggagatttcaagcgctttggggccaaaggcagaaaaggaaatatcttcgtataaaaactagacagaatcattctcagaagctgctgcgtgatgtgtgcgttcaactctcagagtttaacttttcttttcattcagcggtttggaaacactctgtttgtaaagtctgcacgtggatattttgaccacttagaggccttcgttggaaacgggtttttttcatgtaaggctagacagaagaattcccagtaacttccttgtgttgtgtgcattcaactcacagagttgaacgttcccttagacagagcagatttgaaacactctatttgtgaaatttccaagtgtagatttcaagcgctttaaggtcaacggcagaaaaggaaatatcttcgtttcaaaactagacagaatgattctcagaaactcctttgtgatgtgtgcgttcaactcacagagtttaacctttcttttcatagagcagttaggaaacactctgtttgtaaagtctgcaagtggatattcagacctctttgaggccttctttggaaacgggatttcttcatattctgctagagagaagaattctcagtaacttcattgtgttgtgtgtattcaactcacagatttcaacgatcctttacacagagcagacttgaaacactctttttctggaatttgcaagtgtagatttcagccgctttgaggtcaatggtagaataggaaatatcttcctatagaaactagacagaatgattctcagaaactcctttgtgatgtgtgcgttcaactcacagagttcaacctttcttttcatagagcagttaggaaacactctgtttgtaaagtctgcaagtggatattcagacatccttgaggctttcgttggaaacgggatttcttcatattatgctagaaagaagaattctcagtaacttctttgtgttgtgtgtattcaactgacagatttgaactttcatttagagagagcagatttgaaacactgtttttgtggaatttgcaagtggagatttcaagcgctttggggccaaagtcagaaaaggaaatatcttcgtataaaaactagacagaatcattctcagaaactgctgcgtattgtgtgcgttcaactctcagagtttaacttttcttttcattcagcggtttggaaacactctgtttgtaaagtctgcacgtggatattttgaccacttagaggccttcgttggaaacgggattttttcatgtaaggctagacagaagaattcccagtaacttccttgtgttgtgtgcattcacctcacagagttgaacgttcccttagacagagcagatttgaaacactctatttgtgcaatttgcaagtgtagatttcaagcgctttaaggtcaatggcagaaaaggaaatatcttcgtttcaaaactagacagaatgattctcagaaactcctttgtgatgtgtgcgttcaactcacagagttcaacctttcttttcatagagcagttgggaaacactctgtttgtaaagtctgcaagtggatattcagacttctttgaggccttcgttggaagcgggatttcttcatattctgctagacaaaagaattctcagtaacttcctagtgttgtgtgtattcaactcacagagttgaacgatcctttacacagagcagacttgaaacactctttttgtggaatttgcaagtggagatttcagccgctttgaggtcaatggtagaataggaaatatcttcgtatagaaactagacagaatgactctcataaactcctttgtgatgtgtgcgttcaactcacagagtttaacctttcttttcatagagcagttaggaaacactctgtttgtaaagtctgcaagtggatattcagacctccttgaggccttcattggaaacgggatttcttcatattctgctagacagaagaattcccagtaacttccttgtgttgtgtgtgttcaactcacagagttgaactttcatttacccagagcagatttgaaacactctttttgtggaatttgcaagtggagatttcaagcgctttgaggccaaaggcagaaaaggaaatatctccgtttcaaaactagacagaatcattctcagaaactgctctgcgatgtgtgcgttcaactctcagagtttaacttttgttttcattcggcagtttggaaacactctgtttgtaaagtctgcacgtggataatttgaccacttagaggccttcgttggaaacgggtttttttcatgtaaggctagacagaagaattctcagtaacttccttgtgttgtgtgtattcaactcacacagttgaacgatcctttacagagagcagacttgtaacactctttttgtggaatttgcaagtggagatttcagccgctttgaagtcaaagtagaaaaggaaatatcttcctataaaaactagacagaatgattctcagaaactcctttgtgatgtgtgcattcaactcacagagtttaacctttcttttcatagagcagttaggaaacactctgtttgtaaagtctgcaagtggatattcagacctatttgaggccttcgttggaaacgggatttcttcatattctgctagagagaagaattctcagtaacttcattgtgttgtgtgtattcaactcacagatttcaacgatcctttacacagagcagacttgaaacactctttttctggaatttgcaagtggagatttcagccgctttgaggtcaatggtagaataggaaatatcttcctatagaaactagacagaatgattctcagaaactcctttgtgatgtgtgcgttcaactcacagagtttaacctttcttttaatagagcagttaggaaacactctgtttgtaaagtctgcaagtggatattcagacctctttgaggccttcgttggaaacgggtttttttcatataaggctagacagaagaattcccagtaacttccttgtgttgtgtgtgttcaactcacagagttgaacgttcccttagacagagcagatttgaagcactctttttgtggaatttgcaagtggagatttcaagcgctttgaggccaaaggcagaaaaggaaatatcttcgtataaaaactagacagaatcattctcagaaactgctctgcgatgtgtgcgttcaactctcagattttaacttttcttttcattcagcagtttggaaacactctgtttgtaaagtctgcacgtggatattttgaccacttagaggccttcgttggaaacgggtttctttcttgtaaggctagacagaagaattcccagtaacttccttgtgttgtgtacattcaactcacagagttgaacgttcccttagacagagcagatttgaaacactctttttgtgcaattggcaaggggagattttaagcgctttaaggtcaatggcagaaaaggaaatatcttcctttcaaaactagacagaatgattctcagaaactcctttgtgatgtgtgcgttaaactcacagagtttaacctttcttttcatagagcagttaggaaacactctgtttgtaaagtctgcaagtggatattcagacatccttgaggctttcgttggaaacgggatttcttcatattctgctagaaagaagaattctcagtaatttccttgtgttgtgtgtattcaactcacagagttgaacgatcctttacagagagcagacttgaaacactctttttgtggaatttgcaagtggagatttcagccgctttgaagtcaatggtagaataggaaatatcttcctacagaaaagagacagaatgattctcagaaactcctttgtgatgtgtgcgttgaactcagagagtttaacctttcttttcatagagcagttaggaaacactctgtttgtaaagtctgcaagtggatattcagacatccttgaggctttcgttggaaacgggatttcttcatattctgctagaaagaagaattcccagtaacttccttgtgttgtgtgtgttcaactcacagagttgaactttcatttacacagagcagatttgaaagactctttttgtggaatttgcaagtggagatttcaagcgctgtgaagccaaaggcagaaaaggaaatatcttcgtataaaaactagacagaatcattctcagaaactgctgcgtgatgtgtgcgttcaactctcagagtttaacttttcttttcattcagcggtttggaaatactgtgtttgtaaagtctgcacgtgcatattttgaccactaagaggccttcgttggaaacgggtttttttcatgtaaggctagacagaagaattcccagtaacttccttgtgttgtgtgcattcaactcacagagttgaacgttcccttagacagagcagatttgaaacactctatttgtccaatttgcaagtgtagatttcaagcgctttaaggtcaacggcagaaaaggaaatatcttcgtttcaaaactagacagaatcattcccacaaactgcgttgtgatgtgttcgttcaactcacagagtttaacctttctgttcatagagcagttaggaaacactctgtttgtaaactctgtaagtggatattctgacatcttgtggccttcgttggaaacgggatttcttcacattctgctagacagaagaattctcagaatcttccttgtgtagtgtgtattcaactcacagagttgaacgatcctttacacagagcagacttgaaacactctttttgtggaatttgcaagtggagatttcagccgctttgaggtccatggtagaaaaggaaatatcttcgtataaaaactagacagaatgattctcagaaacttctttgtgatgtgtgcattcaactcacagagtttaacctttcttttcatagagcagttaggaaacactctgtttgtaaactctgcaagtggatattcagacctctttgaggccttcgttggaaacgggatttcttcatactatgctagacagaagaattctcagtaacttccttgtgttgtgtattcaactgacagagttgaactttcatttagagagagcagatttgaaacactgtttttgtggaatttgcaagtggagatttcaagcgctttggggccaaaggcagaaaaggaaatatcttcgtataaaaactagacagaatcattctcagaaactgctctgcgatgtgtgcgttcaactctcagagtttaacttttcttttcattcagcagtttggaaacactctgtttgtaaagtctgcacgtggatattttgaccacttagaggccttcgttggaaatgggtttttttcctgtaaggctagacagaagaattcccagtaacttccttgtgttgtgtgcattcaactcacagagatgaacattcccttagacagagcagatttgaaacactctatttgtgtaatttgcaagtgtagatttcaagcgctttaaggtcaatggcaaaaaaggaaatatctgcgtttcaaaactagacagaatcattcccacaaactgcgttgtgatgtgttcgttcaactcacagactttaacctttctgttcatagagcagttaggaaacacactgtttgtaaagtctgcaagtggatattcagacctccttgaggccttcgttggaaacggtatttcttcatattctgctagacagaaaaattctcagtaacttccttgtgttgtgtgtattcaactcacagagttgaactatcctttacaaagagcagacttgaaacactctttttgtggaatttgcaagtggagatttcagccgctttgaggtcaatggtagaaaaggaaatatcttcgtataaaaactagacagaatgattctcataaactactttgtgatgtgtgcgttcaactcacagagtttaacttttcttttcatagagcagttaggaaacactctgtttgtaaagtctgcaagtggatattcagacctctttgaggccttcgttggaaacgggatttcttcatattctgctagacagaagaattctcagcaacttccttgtgttgtgtgtattgaactcacagagttgaacgatcctttacacagagcagacttgaaacactctatttgtagaatttgcaagtggagatttcagccgctttgaggtcaatagtagaaaaggaaatatcttcgtagaaaaactagacagaatgattctcagaaactcctttgtgatgtgtgtgttcaacgcacagagtttaacctttcttttcatagagcagttaggaaacactctgtttgtaaagtctgcaagtggatattcagacctctttgaggccttcgttggaaacgggtttttttcatataaggctagacagaagaattcccagtaacttccttgtgttgtgtgtgttcaactcacagagttgaactttcgtttacacagagcagatttgaaacactctttttgtggaatttgcaagtggagatttcaagcgctttgaggccaaaggcagaaaaggaaatatcttcgtttcaaaactagacagaatcattctcagaaactgctctgtgatgtgtgcgttcaactctcagagtttaacttttcttttcattcagcactttggaaacactctgtttgtaaagtcttcacgaggatattttgaccacttagaggtctttgttggaaacgggtttttttcacataaggctagacagaagaattcccagtaacttccttgtgttgtgtgcattcaactcacagagttgaacgttccttagacacagcagatttgaaacactctatttgtgcaatttgcaagtgtagatttcaagcgctttaaggtcaatggcagaaaaggaaatatcttcgtttcaaaactagacagaaatcattcccacaaactgcgttgtgatgtgttcgttcaactcacagagtttaacctttctgttcatagagcagttaggaaacactctgtttgtaaagtctgtaagtggatattcagacatcttgtggccttcgttggaaacgggatttcttcatattctgctagacagaagaattctcagtaacttccttgtgttgtgtgtattcaactcacagagttgaacgatcctttacacagagcagagttgaaacactctttttgtggaatatgcaaggggagatttctgccgctttgagtcaatggtagaaaaggaaatatcttcgtataaagactagacagaatgattctcagaaactcctttgtgatgtgtgcgttcaactcacacagtttaacctttcttttcatagagcagttgggaaacactctgtttgtaaagtctgcaagtggatattcagacctccttgaggccttcgttggaaacgggatttcttcatattatgctagacagaagaattctcagtaacttccttgtgttgtctgtattcaactcacagagttgaacgatcctttacacagagcagacttgaaacactctttttgtggaatttgcaagtggagatttcagccgctttgaagtcaatggtagaataggaaatatcttcctatagaaactagacagaatgattctgagaaactcctttgtaatgtgtgcgttcaactcacagagtttaacctttcttttcatagagcagttaggaaacactctgtttgtaaagtctgcaagtggatattcagacctccttgaggccttcgttggaaacgggatttcttcatattatgctagacagaagaattcccagtaacttccttgtgttgtgtgtgttcaactcacagagttgaactttgatttacacagagcagatttgaaacactctttttgtggaatttgcaagtttagatttcaagcgctttgaggccaaaggcagaaaaggaaatatcttcgtataaaaactagacagaatcattctcagaaactgctctgtgatgtgtgcgtccaactctcagagtttaaattttcttttcattcagcagtttggaaacactctgtttgtaaagtctgcacgtggatattttcagcacttagaggccttcgttggaaactgttttttttcatgtaaggctagacagaagaattcccagtaacttccttgtgttgtgtgcattcaactcacagagttgaacgttcccttagacagagcacatttgaaacactctatttgtgcaatttgcaattgtagatttcaagcgctttaaggtcaatggcagaaaaggaaatatcttcgttttaaaaatagacagaatcattcccacaaactgcgttgtgatgtgttcgttcaactcacagagtttaacctttctgttcatagagcagttaggaaacactctgtttgtaaagtctgtaagtggatattctgacatattgtggccttcgttggaaacgggacttcttcatattctgctagacagaagaattctcagtaacttccttgtgttgtgtgtattcaactcacagagttgcacgatcctttacacagagcggacttgaaacactctttttgtggaatttgcaagtggagattttagccgatttgaggtcaatggtagaataggaaatatcttcctatagaaactagacagaatgattctcagaaactcctttgtgatgtgtgtgttcaactcacagagtttaacctttcttttcatagagcagttagtaaacactgtgtttataaagtctgcaagtggatattcagacccctttgaggccttcgttggaaacgggatttcttcatattatgctagacagaagaattctcagtaacttccttgtgttatgtgtattcaactgacagagttgaactttcatttagagagagcagatttgaaacactgtttttgtggaatttgcaagtggagatttcaagcgctttggggccaaaggcagaaaaggaaatatcttcgtatgaaaactagacagaatcattctcagaaactgctgcgtgatgtgtgcgttcaactctcagagtttaacttttcttttcattcagcggtttggaaacactctgtttgtaaagtctgcacgtggatattttgaccacttagaggccttccttggaaacgggtttttttcatgtaaggctagacagaagaattcccagtaacttccttgtgttgtgtgcattcaactcacagagttgaacgttcccttagacagagcagatttgaaacactctatttgtgcaatctgcaagtgtagatttcaagcgctttaaggtcaacggcagaaaaggaaatatcttcgtttcaaaactagacagaatcattcccacaaactgcgttgtgatgtgttcgttcaactcacagagtttaacctttctgttcatagagcacttaggaaacactctgtttgtaaagtctgcatgtggatattcagacctcctagaggccttcgttggaaacgggatttcttcatattctgctagacagaagaattctcagtaacttccttgtgttgtgtgtattcaagtcacagagttgaacgatcctttacacagagcagatttgaaacactctttttgtggaatttgcaagtggagatttctgccgctttgtggtcaatggtggaaaaggaaatatcttcatataaaaacaagacagaatgattctcataaactcctttgtgatgtgtgcgttcaactcacagagtttaacttttcttttcatagagcagttaggaaacactctgtttgtaaagtctgcaagtggatattcagacctttttgaggccttcgttggaaacgggatttcttcatattatgctagacagaataattctcagtaacttccttgtgttgtgtgtattcaactgacagagttgaactttcatttagagagagcagatttgaaacactgtttttgtggaatttgcaagtgtagatttcaagcgctttggggccaaaggcagaaaaggaaatatcttcgtataaaaagtagacagaatcattctcagaaactgctctgcgatgtgtgcgttcaactctcagagtttaacttttcttttcattcagcagtttggaaacactctgtttgtaaagtctgcacgtggataatttgaccacttagaggccttcgttggaaacgggtttttttcgtgtaaggctagacagaagaattcccagtaacttccttgtgttgtgtgcattccactcacagagttgaacgttcccttagacagagcagatttgaaacactctatttgtgcaatttgcaagtgtagatttcaagcgctttaaggtcaatggcagaaaaggaaatatcttcgtttcaaaactagacagaatcattcccacaaactgcgttgtgatgtgttcgttcaactcacagagtttaacctttctgttcatagagcagttaggaaacactctgtgtgtaaagtctgcaagtggatattcagacctctttgaggccttcgttggaaacgggatttcttcatattctgctagacagaagaattctcagtaactttccttgtgttgtgtgtattcaactcacagagttgaatgatcctttacacagaacagtcttgaaacactctttttgtggaatttgcaagtggagatttcagccgctttgaggtcaatggtagaataggaaatatcttcctatagaaactagacagaatgattctcagaaactcctttgtgatgtgtgcgttgaactcacagagtttaacctttcttttcatagagcagttaggaaacactctgtttgtaaagtctgcaagtggatattaagacctctttgacgccttcgttggaaacgggatttcttcatattctgctagacagaaggaattcccagtaacttccttgtgttgtgtgtgttcaactcacagagttgaactttcatttacacagagcagatttgaaacactctttttgtggaatttccaagtggagatttcaagcgctttgaggccaaaggcagaaaaggaaatatcttcgtataaaaactagacagaatcattctcagaaactgctctgcgatgtgtgcgttcaactctcagagtttaacttttcttttcattcagcagtttggaaacactctgtttgtaaagtctgcaagtggatattttgaccatttagaggccttcgttggaaacgggtttttttcctgtaaggctagagagaagaattcccagtaactcccttgtgttgtgtgcattcaactcacagagttcaacgttcccttagacagagcagatttgaaacactctatttgtgcaatttgcaagcgtagatttcaagcgctttaaggtcaatggcagaaaaggaaatatcttcgtttcaaaactagacagaataattcccacaaactgcgttgtgatgtgttcgttcaactcacagagtttaacctttctgttcatagagcagttaggaaacactctgtttgtaaagtctgtaagtggatattctgacatcttgaggccttcgttggaaacgggatttcttcatattctgctagacagaagaattctcagtaacttccttgtgttgtgtgtattgaactcacagagttgaacgatcctttacacagagcagtcttgaaacactgtttttgtggaatttgcaagtggagatttctgccgctttgaggtcaatggtagaataggaaatatcttcctatagaaactagacagagtgattctcagaaactcctttgtgatgtgtgcgttcaactcacagagtttaacctttcttttcatagagcagttaggaaacactctgtttgtaacgtctgcaagtggatattcagacctccttgaggccttcgttggaaacgggatttcttcatattctgctacagagaagaattctcagtaacttccttgtgttgtgtgtattcaactcacagagttgaacgttcctttacacagagcaggacttgaaacactctttttgtggaatttgcaagtggagatttcaagcgctttgaggccaaaggcagaaaaggaaatatcttcgtataaaaactagacagaatcattctcagaaactgctctgcgatgtgtgtgttcaactctcagagtttaacttttcttttcattcagcagtttggaaacactctgtttgtaaagtctgcacgtggatattttgaccacttagaggccttcgttggaaacgggtttttttcctgtaaggctagacagaagaattcccagtaacttccttgtgttgtgcacattcaactcacagagttgaacgttcccttagacagagcagatttgaaacactctttttgtgcaattggcaagtggagatttcaagcgctttgaggtcaatggcagaaaaggaaatatcttcgtttcaaaattagacagaatgattctcagaaactcctttgtgatgtgtgcattcaactcacagagtttaacctttcttttcatagagcagttaggaaacactctgtttgtatagtctgcaagtggatattcagacctctttgaggccttcgttggaaacgggatttcttcatattatgctagacagaagaattctcagtaacttccttgtgttgtgtgtattcaactcacagagttgaatgatcctttacacagaacagacttgaaacactctttttgtggaatttgcagggggagatttcagccgctttgaggtcaatggtagaaaaggaaatatcttcctatagaaactagacagaatgattctcagaaactcctttgtgatgtgtgcgttcaactcacagagtttaacctttcttttcatagagcagttaggaaacactctgtttgtaaagtctgcaagtggatattcagacatccttgaggctttcgttggaaaagggatttcttcatattctgctagaaagaagaattctcagaaacttccttgagttgtgtgtattcaactcacagagttgaacgatcgtttacacagagcagacttgagacactctttttgtggaatttgtaagtggagatttcagccgatttgaggtcaatggtagaaaaggaaatatcttcatataaaaactagacagaatcattctcagaaactgctctgcgatgtgtgcgttcaactctcagagtttaacttttcttttcattcagcagtttggaaacactctgtttgtaaagtctgcacgtggataacttgaccacttagaggacttcgttggaaacgggtttttttcctgtaaggctagacagaagaattcccagtaacttccttgtgttgtgtacattcaactcacagagttgaacgtttccttagagagagcagatttgaaacactctttttgtgcaattggcaagtggtgatttcagccgctttgaggtcaatggtggaaaaggaaatatcttcgtataaaaactagacagaatcattctcagaaaatgctctgtgatgtgtgcgttcaactctcagagtttaacttttcttttcattcagcactttggaaacactctgtttgtaaagtctgcacgaggatcttttgaccacttagaggtctttgttggaaacgggtttttttcacgtaaggctagacagaagaattcccagtaacttccttgtgttgtgtatattcaactcacagagttgaacgatcctttacacagagcagatttgaaacactctttttgtggaatttgcaagtggagatttcagccgctttgaggtcaatggtagaaaaggaaatatcttcgtttcaaaactagacagaatgattctcagaaactcctttgtgatgtgtgcgttcaactcacagaagtttaacctttcttttcatagagcagttaggaaacactctgtttgtaaagtctgcaagtggatattcagacatctttgaggctttcgttggaaacgggatttcttcatattctgctagacagaagaattctcagaaacttccttgtgttgtgtgtattcaactcacagagttgaacgatcctttacacagagcagacttgaaacactccttttctggaatttgcaggtggagatttcagccgctttgaggtcaatggtagaatagtaaatatcttcgtataaaaactagacagtatcattctcagaaactgctctgcgatgtgtgcgttcaactctcagagtttaacttttcttttcattcagcagtttggaaacactctgtttgtaaagtctgcacgtggatattttgaccacttagaggccttcgttggaaatgggtttttttcctgtaaggctagacagaagaattcccagtaacttccttgtgttgtgtacattcaactcacagagttgaacgttcccttagacagagcagatttgaaacactttttttgtgcaattggcaaatggagatttcaagcgctttaaggtcaatggcagaaaaggaaatatcttcgtttcaaaactagacagaatcattcccacaaactgcgttgtgaggtgttcgttcaactcacagagtttaacctttcttttcatagagcagttaagaaacagtctgtttgaaaattctgtaagtggatattctgacatcttgtggccttcgttggaaacgggatttcttcatattctgctagacagaagaattctcagaatcttccttgtgttgtgtgtattcaactcacagagttgaacgatggtttacaaagagcagatttgaaacactcatttggtggaatttgcaagtggagatttcagccgctttgaggtcaatggtagaaaaggaaatatcttcgtataacaactagacagaacgattctcagaaactccgttgtgatgtttgcgttcaactcacagagtttaacctttcttttcatagagcagttaggaaacactctgtttgtaaagtctgcaagtggatattcagacctctttgaggccttcgttggaaacgggatttcttcctattctgctagacagaagaattcccactaacatccttgtgttgtgtgtgttcaactcacagagttgaactttcatttacacagagcagatttgaaagactctttttgtggaatttgcaaatggagatttcaagcgctttgaggccaaaggcagaaaaggaaatatcttcgtttcaaaactagacagaatcattctcagaaactgctgcgtgatgtgtgcgttcaactctcagagtttaacttttcttttcattcagcggtttggaaacactctgtttgtaaagtctgcaagtggatattttgaccacttagaggccttcgttggaaacgggtttttttcatgtaaggctagacagaagaattcccagtaacttccttgtgttgtgtgcattcaactcacagagttgaacgttcccttagacagagcagatttgaaacactctatttgtgcaatttgcaagtgtagatttcaagcgctttaaggtcaatggcagaaaaggaaatgtcttcgtttcaaaactagacagaatcattcccacaaactgcgttgtgatgtgttcgttcaactaacagagtttaacctttcttttcatagagcagttaggaaacagtctgtttgtaaattctgtaagtggatattctgacatcttgtggccttcgttggaaacgggatttcttcatattctgctagacagaagaattcccagtaacttccttgtgttgtgtgtgttcaactcacagtagttgaactttcatttacacagagcagatttgaaacactctttttgtggaatttgcaaatggagatttcagccgcgttgaggtcaatggtagaaaaggaaatatcttcgtttcaaaactagacagaatgattctcagaaactcctttgtgatgtgtgtgttcaactcacagagtttaacctttcttttcatagagcagttagtaaacactctgtttataaagtctgcaagtggatattcagacccctttgaggccttctttggaaacgggatttcttcatattctgctagacagaagaattcccagtaacttccttgtattgtgtgtgttcaactcacagagttgaactttcatttacacagagcagatttgaaacactctttttgtggaatttgcaagtggagatttcaagcgctttgaggccaaaggcagaaaaggaaatatcttcgtataaaaactagacagaatcattctcagaaactgctctgtgatgtgtgcgttcaactctcagagtttaacttttcttttcattcagcagtttggaaacactctgtttgtaaagtctgcacgtggataatttgaccacttagaggccttcgttggaaacgggtttttttcatgtaaggctagacagaagaattcccagtaacttccttgtgttgtgtacattcaactcacagagttgaaccttcccttagacagagcagatttgaaacactctttttgtgcaattggcaagtggagatttcaagcgctttgaggtcaatggcagaaaaggaaatatcttcgtttcaaaactagacagaatcattcccacaaactgcgttgtgatgtgttcgttcaactcacagcagtttaacctttctgttcatagagcagttaggaaacactctgtttgtaaagtctgtaagtggatattctgacatcttgtggccttcgttggaaacgggatttcttcatattctgctagacagaagaattctcagtaacttctttgtgttgtgtgtattcaactcacagagttgaacgatcctttacacagagcagacttgaaacactctttttgtggaatttgcaagtggagttttcagccgctttgaggtcaatggtagaataggaaacatcttcctatagaaactagacagaatgattctcagaaactcctttgtgatgtgtgcgttcaactcacagagtttaacctttcttttcatagagcagttgggaaacactctgtttgtaaagtctgcaagtggatattcagacctccttgaggctttcgttggaaacgggatatcttcatattctgctagaaagaagaattctcagaaacttccttgtgttgtgtgtattcaactcacagagttgaacgttcgtttacacagagcagacttgagacactctttttgtggaatttgtaagaggagatttcagccgctttgaggtcaatggtagaaaaggaaatatcttcatataaaaactagacagaatgattctcagaaactcctttgtgatgtgtgcgttcaactcacagagtttaacctttcttttcatagagcagttagtaaacactctgtttataaagtctgcaagtggatattcagacccctttgaggccttcgttggaaacgggatttgttcatattctgctagacagaagaattcccagtaacttccttgtgttgtgtgtgttcaactcacagagttgaactttcatttacacagagcagatttgaaacactttttttgtggaatttgcaagtggagatttcaagcgctttgaggccaaaggcagaaaaggaaatatcttcgtataaaaactagacagaatcattctcagaaactgctctgcgatgtgtgcgttcaactctcagagtttaactttgcttttcattcagcagtttggaaacactctgtttgtaaagtctgcacgtggataatttgaccacttagaggccttcgttggaaacgggtttttttcatgtaaggctagacagaagaattcccagtaacttccttgtgttgtgtacattcaactcacagagttgaacgttcccttagacagagcagatttgaaacactctttttgtgcaattggcaaatggagatttcaagcgctttaaggtcaatggcagaaaaggaaatatcttcgtttcaaaactggacagaatgattctcataaactcctttgtgatgtgtgcgttcaactcacacagtttaacctttcttttcatagagcagttaggaaacactctgtttgtaaagtctgcaagtggatattcagacctctttgaggccttcgttggaaaccggatttcttcatattctgctagacagaagaattctcagtaacttccttgtgttgtgtgtattcaactcacagagttgaacgatcctttacacagagcagacttgaaacactctttttgtggaatttggaagtggagatttcagccgctttgaggtcaatagtagaaaaggaaatatcttcgtagaaaaactagacagaatgattcccagaaactcctttgtgatgtgtgcgttcaactcacagagtttaacctttctattcatagagcagttaggaaacaatctgtttgtaaagtctgcaagtcgatattcagacgtctttgcggccttcgttggaaacgggtttttttcatataaggctagacagaagaattctcagtaacttccttgtgttgtgtgtattcaactgacagagttgaactttcatttagatagagcagatttgaaacactgtttttgtggaatttgcaagtggagatttcaagcgctttggggccaaaggcagaaaaggaaatatcttcgtataaaaactagacagaatcattctcagaaactgctgcgtgatgtgtgcgttcaactctcagagtttaacttttcttttcattcagcggtttggaaacactctgtttgtaatgtctgcacgtggatattttgaccacttagaggccttcattggaaacgggtttttttcatgtaaggctagacagaagaattcccagtaacttccttgtgttgtgtgcattcaactcacagagttgaacgttcccttagacagagcagatttgaaacactctatttgtgcaatttgcaagtgtagatttcaagcgctttaaggtcaacggcagaaaaggaaatatcttcgattcaaaactagacagaatcatttccacaaactgcgttgtgaagtgctcgttcaactcacatagtttaacctttctgttcatagagcagttaggaaacactctgtttgtagtgtctgtaagtggatattctgacatcttgtggccttcgttggaaacggaatttcttcatattctgctagacagaagaattctcagaaacttccttgtgttgtgtgtattcaactcacagagttgaacgatcctttacacagagcagacttgaaacactctttttgcggaatttgcaagtggagatttcagccgctttgaggtcaatggtagaataggaaatatcttcctatagaaactagacagaatgattctcataaactcctttgtgatgtgtgcgttcaactcccagagtttaaactttcttttcatagagcagttaggaaacactctgtttgtaaagtctgcaagtggatattcagacctgcttgaggccttctttggaaacgggatttcttcatattatgctagacagaagaattctcagtaacttccttgtgttgtgtgtattcaactgacagagttgaactttcatttcgagagagcagatttgaaacactgtttttgtggaatttgcaagtggagatttcaagcgctttggggccaaaggcagaaaaggaaatatcttcgtataaaaactagacagaatcattctcagaaactgctctgcgatgtgtgcgttcaactctcagagtttaacttttctttttattcagcagtgtggaaaaactctgtttgtaaagtctgcacgtggatattttgaccacttagaggccttcgttggaaacgggtttttttcctgtaaggctagacagaagaattcccagtaacttccttgtgttgtgtacattcaactcacagagttgaacgttcccttagacagagcagatttgaaacactctttttgtgcaattggcaagtggtgatttcagccgctttgaggtcaatggtagaaaaggaaatatcttcgtattaaaactagacagaatgattctcagaaactcctttgtgatgtgtgcgttcaactcacagagtttaacctttcttttcatagagcagttgggaaacactctgtttgtaatgtctgcaagtggatattcagacttctttgaggccttcgttggaagcgggatttcttcatgttctgctagacagaagaattctcagaaacttccttgtgttgtgtgttttcaactcacagagttgaacgatcctttacacagagcagacttgaaacactccttttgtggaatttgcacgtggagatttcagccgctttgaggtcaatggtagaataggaaatatcttcctatagaaagtagacagaatgattctcagaaaatcctttgtgatgtgtgcgttcaactcacagagtttaacttttcttttcatagagcagttaggaaacactctgtttgtaaagtctgcaagtggatattcagacctctttgaggccttggttggaaaccggatttcttcatattatgctagacagaagaattctcagtaacttccttgtgttttgtgtattcaactgacagagttgaactttcatttagagagagcagatttgaaacactgtttttgtggaatttgcaagtggagatttcaagcgctttggggccaaaggcagaaaacgaaatatcttcgtataaaaactagacagaatcattctcaaaaactgctctgcgatgtgtgcgttcaactctcagagtttcacttttcttttcattcagcagtttggaaacactctgtttgtaaagtctgcacgtggataatttgaccacttagaggctttggttggaaacgggtttttttcatgtaaggctagacagaagaattcccagtaacttccttgtgttgtgtacattcaactcacagagttgaacgttcccttagacagagcagatttgaaacactctttttgtgcaattggcaagtggagatttcaagcgctttgaggtcaatggcagaaaaggaaatatcttcgtttcaaaactagacagaatcattcccaaaaactgcgttgtcatgtgttcgttcatctcacagagtttaacctttcttttcatagagcagttaggaaacagtctgtttgtaaattctgtaagtggatattctgacatcttgtggccttcgttggaaacgggatttcttcatattctgctagatagaagaattctcagaatcttccttgtgttgtgtgtattcaactcacagagttgaacgatggtttacacagagcagatttgaaacactctttttgtggaatttgcaagtggagatttcagccgctttgaggtcaatggtagaaaaggaaatatcttcctataaaaactagacagaacgattctcagaaattcctttgtgatgtgtgcgttcaactcacagagtttaacctttcttttcatagagcagttaggaaacactctgtttgtaaagtctgcaagtggatattcagacctctttgaggccttcgttggaaacgggatttcttcctattctgctagacagaagaattcccagtaacttccatgtgttgtgtgtgttcaactcacagagttgaacgttcccttagacagagcagatttgaaacactctttttgtagaatttgcaagtggagatttcaagcgctttgaggccaaaggcagaaaaggaaatatcttcgtataaaaactagacagaatcattctcagaaactgctctgcgatgtgtgcgttcaactctcagagtttaacttttcttttcattcagcagtttggaaacactctgtttgtaaagtctgcacggggatattttgaccacttagaggccttcgttggaaacgggtttttttcctgtaaggctagacagaagaattcccagtaacttccttgtgttgtgtgcattcaactcacagagttgaacgttcccttagacagagcagatttgaaacactctatttgtccaatttgcaagtgtagatttcaagcgctttaaggtcaacggcagaaaaggaaatatcttcgtttcaaaactagacagaatgattctcagaaactcctttgtgatgtgtgcgttcaactcacagagtttaacctttcttttcatagagcagttaggaaacactctctttgtaaagtctgcaagtggatattcagacctctttgaggcctttgttggaaacgggatttcttcatattatgctagacagaagaattctcagtaacttccttgtgttgtgtgtattcaactcacagagttgaacgatcctttacacagagcagacttgaaacactctttttgtggaaattgcaagtggagatttcagccgctttgaagtcaatggtagaaaaggaaatatcttcgtataaaaactagacagaatgattctcagaaacttctttgtgatgtgtgcgttcaactcacagagtttaacctttcttttcatagagcagttaggaaacactctgtttgtaaactctgcaagtggatatacagacctctttgaggccttcgttggaaacgggatttcttcatactatgctagacagaagaattctcagtaacttccttgtgttgtgtgtattcaactgacagagttgaactttcatttagagagagcagatttgaaacactgtttttgtggaatttgcaagtggtgacttcaagcgctttggggccaaaggcagaaaaggaaatatcttcgtataaaaactagacagaatcattctcagaaactgctctgcgatgtgtgcgttcaactctcagagtttaacttttcttttcattcagcagtttggaaacactctgtttgtaaagtctgcacgtggataatttgaccacttagaggccttcgttggaaacaggtttttttcatgtaaggctagacagaagaattcccagtaacttccttgtgttgtgtgcattcaactcacagagttgaacgttcccttagacagagcagatttgaaacactctatttgtgcaatatgcaactgtagatttcaagcgctttaaggtcaatggcagaaaaggaaatatcttcgtttcaaaactagacagaatcattcccacaaactgcgttgtgatgtgttcgttcaactcacagagtttaacctttctgttcatagagcagttaggaaacactctgtttgtaaagtctgtaagtggatattctgacatcttgtggcattcgttggaaacgggatttcttcatattctgctagacagaagaattctcagtaacttccttgtgttgtgtgtattcaactcacagaattgaacgatcctttacacagagcagacttgaaacacactttttgtggaatttgcaagtggagatttcagccgctttgaggtcaatggtagaaaaggaaatatcttcgtatagaaacaagacagaatgattctcagaaactcctttgtgatgtgggtgttcaactcacagggtttaactttcttttcatagagcagttaggaaacacactgtttctaaagtctgcaagtggatattttcacctctttgaggccttcgttgcaaacggcttttttttcatgtaaggctagacagaagaattctcagtaacttccttttgttgtgtgtattcaactgacagagttgaactttcatttagacagagcagatttgaaacactctttttctggaatttgcaagtggagatttcaagcgctttgaggccaaaggcagaaaaggatatattttcgtataaaaactagacagaatcattctcagaaactgctctgcgatgtatgcgttcaactctcagagtttaacttttcttttcattcagcagtttggaaacactctgtttgtaaagtctgcacgtggatattttgaccacttagaggccttcgttggaaacgggtttttttcatgtaaggctagacagaagcattcccagtaacttccttgtgttgtgtgcattcaactcacagagatgaacgttcccttagacagagcagatttgaaacactctatttgtgcaatttgcaagtgtagatttcaagcgctttaaggtcaatggcagaaaaggaaatatcttcgtttcaaaactagacagaatgattctcagaaacttctttgtgatgtgtgcgttcaactcacagagtttaacctttcttttcatagagcagttaggaaacactctgtttgtaaattctgtaagtggatattctgaaatcttgtggccttcgttggaaacgggatttcttcatattctgctagacagaagaattctcagtaacttccttgtgttgtgtgtattcaactcacagagttcaacgatcctttacacagagcagacttgtaacactctttttgtggaatttgcaagtggagatttcagccgctttgaagtcaaaggtagaaaaggaaatatcttcctataaaaactagacagaaagattctcagaaactcctttgtgatgtgtgcgttcaactcacagagtttaacctttcttttcatagagcagttaggaaacactctgtttgtaaagtctgcaagtggatattcagacctctttgaggccttcgttggaaacgggatttcttcatactgtgctagacagaagaattctcagtaacttccttgtgttgtgtgtattcaactgacagagttgaactttcatttagagagagcagatttgaaacactgtttttgtggaatttgcaagtggagatttcaagcgctttggggccaaaagcagaaaaggaaatatcttcgtagaaaaactagacagaatcattctcagaaactgctctgcgatgtgtgcgttcaactctcagagtttaacttttcttttcattcagcagtttggaaacactctgtttgtaaagtctgcacgtggatattttgaccacttagacgccttcgttggaaacgggtttttttccagtaaggctagacagaagaattcccagtaacttccttgtgttgtgtgcattcaactcacagagttgaacgttcccttagacagagcagatttgaaacactctatttgtgcaatttgcaagtgtagatttcaagcgctttaaggtcaatggtagaaaaggaaatatcttcgttttaaaactagacagaatcattcccacaaactgcgttgtgatgtgctcgttcaactcacagagtttaacctttctgttcatagagcagttaggaaacactctgtttgtaaagtctgcaagtggatattcagacctctttgaggccttcgttggaaaagggatttcttcatattctgctagacagaagaattctcagtaacttccttgtgttgtgtgtatacaactcacagagttgaacgatcctttacacagagcagacttgagacactctttttgtggaatttgcaagtggagatttcagccgctttgagttcaatggtagaataggaaatatcttcctatagaaactagacagaatgattctcagaaactcctttgtgatgtgtgcgttcaactcacagagtttaacttttcttttcatagagcagttagggaacactctgtttgtaaagtctgcaagtggatattcagacctctttgaggccttcgttggaaacgggatttcttcatattctgctagacagaagaattctcagaaacttccttgtgttgtgtgttttcaactcacagagttgaacgatcctttacacagagcagacttgaaacactccttttgaggaatttgcaagtggagatttcagccgctttgaggtcaatggtagaataggaaatatcttcctatagaaactagacagaatgattctcagaaactcctttgtgatgtgtgcgttcaactcacagagtttaacctttcttttcatagagcagttaggaaacactctgtttgtaaagtctgcaagtggatattcagacctgtttgaggccttcgttggaaacgggtttctttcatataaggctagacagaagaattctcaagtaacttccttgtgttgtgtttattcaactcacagagttgaatgatcctttacacagagcagacttgaaacactctttttgtggaaattgcaaatggagatttcagccgctttgaggtcaatggtagaaaagtaaatatcttcgtataaagactagacagaatgattctcagaaactcctttttgatgtgtgcgttcaactcacagagtttaacctttctgttcatagagcagttaggaaacactctgtttgtaaagtctgcaagtggatattcagacctcctagaggccttcgttgaaaacgggatttcttcatattctgctagacagaagaattcccagtaacttccttgtgttgtgtacattcaactcacagaggtgaacgttcccttagacagagcagatttgaaacactctttttgtgcaattggcaagtggagatttcaagcgctttgaggtcaatggcagaaaaggaaatatcttcctttcaaaactagacagaatcattctcagaaactgctctgcgatgtgtgcgttcaactctgagagtttaacttttcttttcattcagcagtttggaaacactctgtttgtaaagtctgcacgtggataatttgaccacttagaggccttcgttggaaacgggtttttttcatgtaaggctagacagaagaattctcagtaacttccttgtgttgtgtgtattcaactcacagagttgaacgatcctttacacagagcagacttgtaacactctttttgtggaatttgcaagtggagatttctgccgctttgaagtcaaaggtagaaaaggaaatatcttcctataaaaactagacagaatgattctcagaaacttctttgtgatgtgtgcgatcaactcacagagtttaacctttcttttcatagagcagttaggaaacactctgtttgtaaactctgcaagtggatgttcagacctgtttgaggccttcgttggaaacgggatttcttcatactatgctagacagaagaattctcaagtaacttccttgtgttgtgtgtattcaactgacagagttgaactttcatttagagagagcagatttgaaactctgtttttgtggaatttgcaagtggagatttcaagcgctttggggccaaaggcagaaaaggaaatatcttcgtataaaaactagacagaatgattctcagaaactcctttgtgatgtgtgcgttcaactctcagagtttaacttttcttttcattcagcagtttggaaacactctgtttgtaaagtctgcacgtggatattttgaccacttagaggccttcgttggaaacgggtttttttcctgtaaggctagacagaagaattctcagtaacttccttttgttgtgtgtattcaactcacagagttgaacgatcgtttacacagaacagattagaaacactctttttgtggaatttgcaagtggagatttcagccgctttgaggtcaatggtagaataggaaatatcttcctatagaaactagacagactgattctcagaaactcctttgtgatgtgtgcgttcaactcacagagtttaacctttcttttcatagagcagttaggaaacactctgtttgtaaagtctgcaagtggatattcagacatctttgaggctttcgttggaaacggggtttcttcatattctgctatagagaagaattctcagaaacttccttgtgttgtgtgttttcaactcacagagttgaacgatgctttacacagagtagacttgaaacactctttttgtggaatttgcaagtggagatttcagccgctttgacgtcaatggtagaaaaggaaatatcttcgtataaaaactagacagaatgattctcagaaactcctttgtgatgtgtgcgttcaacttacagagtttaacctttcttttcatagagcagttaggaaacactctgtttgtaaagtctgcaagtggatattcagacctctttgaggccttcgttggaaacgggatttcttcatactatgctagacagaagaattcccagtaacttccttgtgtgtgtgtgttcaactcacagagttgaactttcatttacacagagcagatttgaaacactctttttgtggaatttgcaaatggggatttcaagcgctttgaggccaaaggcagaaaaggaaatatcttcgtataaaaactagacagaatcattctcagaaactgctctgcgatgtgtgcgttcaactctcagagtttaacttttcttttcattcagcagtttggaaacactctgtaaagtctgcacgtggatattttgaccacttagaggccttcgttggaaacgggtttttttcctgtaaggctagacagaagaattcccagtaacttccttgtgttgtgtgcattcaactcacagagttgaacgttcccttagacagagcagatttgaaacactctatttgtgcaatttgcaagtgtagttttcaagctctttaaggtcaacggcagaaaaggaaatatcttcgtttcaaaactagacagaatcattcccacaaactacgttgtgaggtgttcagtaaactcacagagtttaacctctcttttcatagagcagttgggaaacagtctgtttgtaaattctgtaagtggatattctgacaacttgtggccttcgttggaaacgggatttcttcatattctgctagacagaagaattctcagtaaattccttgtgttgtgtgtattcatctcacagagttgaacgatcctttacacagagcagacttgaaacactctttttgtggaatttgcaagtggagatttcagccgctttgaggtcaatggtagaaaaggaaatatcttcgtataaaaactagacagaatgattctcagaaacacctttgtgatgtgtgcgttcaactcacagagtttaacctttcttttcatagagcagttaggaaacactctgtttgtgaagtctgtaagtggatattcagacctccttgaggccttcgttggaaacgggatttcttcatattatgctagacagaagaattctcagtaacttccttgtgttgtgtgtattcaagtgacagagttgaactttcatttagagagagcagatttgaaacactgtttttgtggaatttgcaagtggagatttccagcgctttggggccaaaggcagaaaaggaaatatcttcgtataaaaactagacagaatcattctcagaaactgctgtgcgatgtgtgcgttcaactctcagagtttaacttttcttttcattcagcagtttggaaacactctgtttgtaaagtctgcacgtggatattttgaccacttagaggccttcgttggaaacaggtttttttcctgtaaggctagacagaagaattcccggtaacttccttgtgttgtgtacattcaactcacagagttgaacgttcccttagacagagcagatttgaaacactctttttgtgcaattggcaaatggagatttcaagcgctttaaggtcaatggcagaaaaagaaatatcttcgtttcaaaactagacagaatcattcccacaaactgcgttgtgatgtgttcgttcaactcacagagtttaacctttcttttcatagagcagttaggaaacagtctgtttgtcaattctgtaagtggatattctgacgtcttgtggccttcgttggaaacgggttttcttcatattctgctagacagaagaattctcagtaacttccttgtgttgtgtgtattcaactcacagagttgaacgatcctttacacagagcagacttgaaacactctttttgtggaatttgcaagtggagatttcagccgctttgaggttaatggtagaaaatgaaatatcttcgtatagaaactagacagaaatgattctcagaaactcctttgtgatgtgtgtgttcaactcacagagtttaacctttcttttcatagaacagttaggaaacactctgtttgtaaagtctgcaagtggatattcagaactctttggggccttcgttggaaacgggtttttttcatataaggctagacagaagaattcccaagtaacttccttgtgttgtgtgtgttcaactcacagagttgaactttcatttacacagagcagatttgaaacactctttttgtggaatttgcaagtggagatttcaagcgctgtgaggccaaaggcagaaaaggaaatatcttcgtataaaaactagacagaatcattctcagaaactgctctgcgatgtgtgcgttcaactctgagagtttaacttttcttttcattcagcagtttggaaacactctgtttgtaaagtctgcacgtggatattttgaccacttagaggccttcgttggaaacgggtttttttcctgtaaggctagacagaagaattcccagtaacttccttctgttgtgtacattcaactcacagagttgaacgttcccttagacagagcagatttgaaacactctttttgtgcaattggcaaatggagatttcaagcgctttaaggtcaatggcagaaaaggaaatatcttcgtttcaaaactagacagaatcattcccacaaactgcgttgtgatgtgttcgttcaactcacagagtttaacctttcttttcatagagcagttaggaaacactctgttgctaaattctgtaagtggatattctgacatcttgtggccttcgttggaaacgggatttcttcatattctgctagacagaggaattctcagtaacttccttgtgttgtgtgtattcaactcacagagttgaacgatcctttacacagagcagacttgaaacactctttttgtggaatttgcaagtggagatttcagccgctttgagttcaatggtagaataggaaatatcttcctatagaaactacacagaatgattctcagaaactcgtttgtgatgtgcgcgttcaactcacagagttcaacctttcttttcatagagcagttgggaaacactctgtttgtaaagtctgcaagtggatattcagacttctttgaggccttcgttggaagcgggatttcttcatattctgctagacagaagaattcccagtaacttccttgtgttgtgtgtgttcaactcacagagttgaactttcatttacacagagcagatttgaaacactctttttgtggaatttgcaagtggagatttcaagcgctttgaggacaaaggcagaaaaggaaatatcttcgtataaaaactagacagaatcattctcagaaactgctgcgtgatgtgtgctttcaactctcagagtttaacttttcttttcattcagcggtttggaaacactctgtttgtaaagtctgcacgtggaaattttgaccacttagaggccttcgttggaaacgggtttttttcatgtaaggctagacagaagaattcccagtaacttccttctgttgtgtacattcaactcacagagttgaacgttcccttagacagagcagatttgaaacactctttttgtgcaattggcaagtggtgatttcagccgctttgaggtcaatggtagaaaaggaaatatcttcgtataaaaactagacagaatcattcccacaaactgcattgtgatgtgttcgttcaactcacagagtttaacctttccgttcatagagcagtcaggaaacacactgtttgtaaagtctctaagtggatattctgacatcttgtggccttcgttggaaacgggatttcttcatattctgctagacagaagaattctcagtaacttccttgtgttgtgtgtattcaactcacagagttgaacgatcctttacacagagcagacttgaaacactctttttgtggaatttgcaagtggagatttcagcagctttgaggtcaatggtagaaaaggaaatatcttcgtataaagactagacagaatgattctcagaaactcctttgtgatgtgtgtgttcaactcacagagtttaacttttcttttcatagagcagttaggaaacactctgtttgtaaagtctgcaagtggatattcagacctctttgaggccttcgttggaaacgggatttcttcatattatgctagacagaagaattctcagtaacttccttgtgttgtgtgtattcaactgacagagttgaactttcatttagagagagcagatttgaaacactgtttttgtggagtttgcaagtggagatttcaagcgcttttgggccaaaggcagaaaaggaaatatcttcgtataaaaactagacagaatcattctcagaaactgctgcgtgatgtgtgcgttcaactctcagagtttaacttttcttttcattcagcagtttggaaacactctgtttgtaaagtctgcacgtggaaattttgaccacttagaggccttcgttggaaacgggtttttttcatgtaaggctagacagaagaattcccagtaacttccttgtgttgtgtgcattcaactcacagagttgaacgttcccttagacagagcagatttgaaacactctatttgtgcaatttgcaagtgtagttttcaagctctttaaggtcaacggcagaaaaggaaatatcttcgtttcaaaactagacagaatcattcccacaaactgcgttgtgaagtgctcgttcaactcacagattttaaactttctgttcatagagcagttaggaaacactctgtttgtaaagtctgtaagtggatattctgacatcttgtggccttcgttggaaacggaatttcttcatattctgctagacagaagaattctcagtaacttccttgtgttgtgtgtattcaactcacagagttgaacgatcctttacacagaggagacttgaaacactccttttgtggaatttgcaagtggagatttcagccgctttgaggtcaatggtagaataggaaatatcttcctatagaaactagacagaatgattctgagaaatcctttgtgatgtgtgcgttcaactcacagagtttaacctttcttttcatagagcagttaggaaacactctgtttgtaaagtctgcaagtggatattcagacctccttgaggccttcgttggaaacgggatttcttcatattatgctagaaagaagaattcccagtaacttccttgtgttgtgtgtgttcaactcacagagttgaactttcatttacacagagcagattggaaacactctttttgtggaatttgcaagtggagatttcatgcgctttgaggccaaaggcagaaaaggaaatatcttcgtataaaaactagacagaatcattctcagaaactgctctgcgatgtgtgcgttcaactctcaagagtttaacttttcttttcattcagcagtttggaaacactctgtttgtaaagtctgcacgtggataacttgaccacttagaggacttcgttggaaacgggtttttttcctgtaaggctagacagaagaattcccagtaacttccttgtgttgtgtacattcaactcacagagttgaacgttcccttagacagagcagatttgaaacactctttttgtgcaattggcaaatggagatttcaagcgctttaaggtcaatggcaggaaaggaaatatcttcgtttcaaaactagacagaataattcccacaaactgcgttgtgatgtgttcgttcaactcacagagtttaacctttcttttcatagagcacttaggaaacagtctgtttgtaaattctgtaagtggatattctgacatcttgtggccttcgttggaaacgggatttcttcatattctgctagacagaagaattctcagaaacttccttgtgttgtgtgttttcaactcacagagttgaacgatgctttacacagagtagacttgaaacactctttttgtgtaatttgcaagtggagatttcagccgccttgaggtcaatggtagaaaaggaaatatcttcgtataaaaactagacagaaatgattctcagaaactcctttgagatgtgtgtgttcaactcacagagtttaacctttcttttcatagagcagttaggaatcactctgtttgtaaagtctgcaggtggatattcagacctctttgaggccttcgttggaaacgggtttttttcatataaggctagagagaagaattctcagtaacttccttgtgttgtgtgtattcaactgacagaattgaactttcatttagagagagcagatttgaaacactgtttttgtggaatttgcaattggagatttcaagcgctttggggccaaaggcagaaaaggaaatatcttcgtataaaaagtagacagaatcattctcagaaactgctgcgtgatgtgtgcgttcaactctcagagtttaacttttctttccattcagcggtttggaaacactctgtttgtaaagtctgcacgtggatattttgaccacttagaggccttcgttggaaacgggtttttttcatgtaaggctagacagaagaattcccagtaacttccttgtgttgtgtacattccactcacagagttgaacgttcccttagacagagcagatttgaaacactctttttgtgcaattggcaagtggagatttcaagcgctttaaggtcaatggcagaaaaggaaatatcttcgtttcaaaactagacagaatcattcccacaaactgcgttgtgatgtgttcgttcaactcacagagtttaacctttctgttcatagagctgttaggaaacactctgtttgtaaagtctgtaagtggatattctgacatcttgtggccttcgttggaaacgggatttcttcatattctgctagacagaataattctcagtaacttccttgtgttgtgtgtattcaactcacagagttgaaggatcctttacagagagcaggcttgaaacactctttttgtcgaatttgcaagtggagatttcagccgctttgaggtcaatggtagaataggaaatatcttcttatacaaactagacagaatgattctcagaaactcctttgtgatgtgtgtgttcaactcacagagtttaacctttcttttcatagagcagttaggaaacactctgtttctaaagtctgcaagtggatattcagacctctttgaggccttcgttggaaacgggtttttttcatataaggctagacagaagaattcccagtaacttccatgtgttgtgtgtgttcaactcacagagttgaactttcatttacacagagtagatttgaaacactctttttgtggaatttgcaaatggagatttcaaactctttgaggccaaaggcagaaaaggaaatatcttcgtataaaaactagacagaatcattctcagaaactgctctgcgatgtgtgcgttcaactctcagagtttaacttttcttttcattcagcagtttggaaacactctggttgtaaagtctgcacgtggatattttgaccacttagaggccttcgttggaaacgggtttttttcctgtaaggctagacagaagaattcccagtaacttccttgtgttgtgtgcattcaactcacagagttgaacattcccttagacagagcagatttgaaacactctatttgtgcaatttgcaagtgtagatttcaagcgctttaaggtcaatggcagaaaaggaaatatcttcgtttcaaaactagacagaatcattcccacaaactgcgttgtgatgtgttcgttcaagtcacagagtttaacttttctgttcatagagcagttagaaaacactctgtttgtaaagtctgcaagtggatattcagacctccttgaggccttcgttggaaacgggatttcttcatattctgctagacagaaagaattctcagtaacttccttgtgttgtgtgtattcaactcacagagttgaacgatcctttacacagagcagacttgtaacactctttttgtggaatttgcaagtggagatttcagccgctttgaagtcaaaggtagaaaaggaaatatcttcctataaaaactagacagaatgattctcagaaactcctttgtgatgtgtgcgttcaactcacagagtttaacctttcttttcatagagcagttaggaaacactctgcttgtaaagtctgcaagtggatattcagccctctttgaggccttcgttggaaacgggttttttttatataaggctagacagaagaattctcagtaacttccttgtgttgtgtttattcaactcacagagttgaatgatcctttacacagagcagaattgaaacactctttttgtggaatttgcaagtggagatttcagccgctttgaggtcaacggtagaaaagtaaatatcttcgtataaagactagacagaatcattctcagaaactgctctgcgatgtgtgcgttcaactctcagagtttaacttttcttttcattcagcagtttggaaacactctgtttgtaaagtctgcacgtggataatttgaccacttagaggccttcattggaaacgggtttttttcctgtaaggttagacagaagaattcccagtaacttccttgtgttgtgtacattcaactcacagagttgaacgttcccttagacagagcagatttgaaacactctttttgtgcaattggcaaggggagatttcaagcgctttaaggtcaatggcagaaaaggaaatatcttcgtttcaaaactagacagaatcattcccaaaaactgcgttgtgatgtgttcgttcaactcacagagtttaacctttcttatcatagagcagttgggaaacagtctgtttgtaaattctgtaagtggatattctgacatcttgtggtcttcgttggaaacgggatttcttcatattctgctagacagaataattctcagtaacttccttgtgttgtgtgtattcaactcacagagttgaacgatcctttacagagatcaggattgaaacactctttttgtcgaatttgcaagtggagatttcagccgctttgaggtcaatggtagaataggaaatatcttcttatagaaactagacagaatgattctcagaaactcttttgtgatgtgggtgttcaactcacagagtttaactttcttttcatagagcagttaggaaacactctgtttataaagtctgcaagtggatattttcacctctttgaggccttcgttggaaacgggttttttttcatgtaaggctagacagaagcattctcagaaactgctctgcgatgtgtgcgttcaactctcagagtttaacttttcttttcattcagcagtttggaaacactctgtttgtaaagtctgcacgtggatattttgaccacttagaggccttcgttggaaacgggtttttttcctgtaaggctagacagaagaattcccagtaacttccttgtgttgggtgcattcaactcacagagttgaacgttccttagacacagcagatttgaaacactctatttgtgcaatttgcaagagtagattccaagcgctttaaggtcaatggcagaaaaggaaatatcttcgtttcaaaactagacagaatcattcccacaaactgcgttgtgatgtgttcgttcaactcacagagtttaacctttcttttcatagaccagttaggaaacagtctgtttgtaaattctgtaagtggatattctgacatattgtggccttcgttggaaacgggatttcttcatattctgctagacagaagaattctcagtaacttccttgtgttgtgtgtattcaactcacagagttgaacgatcctttacacagagcagacttgaaacactctttttgcggaatttgcaagtggagatttcagccgctttgaggtcaatggtagaataggaaatatcttcctatagaaactagacagaatgattctcagaaactcctttgtgatgtgtgggttcaactcacagagtttaacctttcttttcatagagcagttaggaaacactctgtttgtaaagtctgcaagtggatattcagacctctttgaggccttcgttggaaacgggattttttcatataaggctagacagaagaattcccagtaacttccttgtgttgtgtgtgttcaactcacagaattgaactttcatttacacagagcagatttgaaacactctttttgtggaatttgcaaatggagatttcaagcgctttgaggccaaaggcagaaaaggaaatgtcttcgtttcaaaactagacagaatgattctcagaaactgctctgcgatgagtgcgttcaactctcagagtttaacttttcttttcattcagcagtttggaaacactctgtttgtaaagtctgcacgtggatattttgaccacttagaggccttcgtcggaaacgggtttttttcatgtaaggctatagagaagaattcccagtaacttccttgtgttgtgtacattcaactcacagagttgaacgttcccttagacagagcagatttgaaacactctttttgtgcaattggcaagtggtgatttcaaccgctttgaggtcaatggtagaaaaggaaatatcttcgtataaaaactagacagaatcattcccacaaactgcgttgtgatggttcgttcaactcacagagtttaacctttcttttcatagagcagttaggaaacagtctgtttgtcaattctgtaagtggatattctgacatcttgtggccttcgttggaaacgggatttcttcatattttcctagacagagtaattctcagtaacttccgtgtgttgagtgtattcaactcagagagttgaacgatcctttacagagagcagacttgaaacactctttttgtggaatttgcaagtggagatttcatccgctttgaggtcaatggtagaaaaggaaatatcttcgtataaagactagacagaatgattctcagaaacttctttgtgatgtgtgcgttcaactcacagagtttaacctttcttttcatagagcagttaggaaacactctgtttgtaaactctgcaagtggatattcaaacctctttgaggccttcgttggaaacgggatttcttcatactgtgctagacagaagaattctcagtaacttccttgtgttgtgtgtattcaactgacagagttgaactttcatttagagagagtagttttgaaacactgtttttgtggaatttgcaagtggagatttcaagcgctttggggccaaaggcagaaaaggaaatatcttcgtataaaaactagacagaatcattctcagaaactgctgcgtgatgtgtgcgttcaacactcagagtttaacttttcttttcattcagcggtttggaaacactctgtttgtaaagtctgaacgtgcatattttgaccacttagaggccttcgttggaaacgggtttttttcatgtaaggctagacagaagaattctcagtaacttccttgtgttgtgtttattcaactcacagagttgaatgatcctttacacagagcagatttgaaacactctatttgtgcaatttgcaagtgtagatttcaagcgctttaaggtcaacggcagaaaaggaaatatcttcgtttcaaaactagacagaatcattcccacaaactacgttgtgatgtgttcgttcaactcacagagtttaacctttcttttcatagagcagttaggaaacagtctgtttgtcaattctgtaagtggatattctgacatcttgtggccttcgttggaaacgggatttcttcatattctgctagacagaagaattctcagtaacttccttgtgttgtgtgtattccactcacagagttgaacgatcctttacacagagcagacttgtaacactctttttgtggaattttcaagtggagatttcagccgctttgaagtcaaagttagaaaaggaaatatcctcctataaaaactagacagaatgattctcagaaactcctttgtgatgtgtgtgttcaactcacagagtttaacgtttcttttcatagagcagttagtaaacactctgtttatgaagtctgcaagtggatattcagacctctttgaggtcttcgttggaaacgggatttcttcatattatgctagacagaagaattctcagaaacttccttgtgttgtgtgttttcaactcacagagtacaacgatcctttacacagagtagacttgaaacactctttttgtggaattggcaagtggagatttcagccgctttgaggtcaatggtagaaaaggcaatatcttcgtataaaaactagacagaatcattctcagaaactgctctgcgatgtgtgcgttcaactctcagtgtttaacttttcttttcattcagcagtttggaaacactctgtttgtaaagtctgcacgtggatattttgaccacttagaggccttcgttggaaacgggtttttttcctgtaaggctagacagaagaattcccagtaacttccttgtgttgtgagcattcaactcacagagttgaacgttcccttagaccgagcagatttgaaacactctatttgtgcaatttgcaagtgtagttttcaagctctttaaggtcaacggcagaaaaggaaatatcttcgtttcaaaactagacagaatgattctcagaaactcctttgtgatgtgtgcgttcaactcacagagtttaacctttcttttcatagagcagttaggaaacagtctgtttgtcaattctgtaagtggatattctgacatcttgtggccttcgttggaaacgggatttcttcatattctgctagacagaagaattctcagtaacttccttgtgttgtgtgtattcaactcacagagttgaacgatcctttacacagagcagacttgaaacactctttttgtggaatttgcaagtggagatttcagccgctttgagttcaatggtagaataggaaatatcttcctatagaaactagagagaatgattctcagaaactcctttgtgatgtgtgtgttcaactcacagagttgaacctttcttttcatagagcagtaagtaaacactctgtttataaagtctgcaagtggatattcagacccctttgaggccttcgttggaaacgggatttcttcatattatgctagacagaagaattctcagtaacttccttgtgttgtgtgtattcaactgacagagttgaactttcatttagacagagcagatttgaaacactctttttgtggaatttgcaagtggagatttcaagcgctttgaggccaaagtcagaaaaggaaatatcttcgtataaaaactagacagaatcattctcagaaactgctctgcgatgtgtgcgttcaactctcacagtttaacttttcttttcattcagcagtttggaaacactctgtttgtaaagtctgcacgtggataatttgaccacttagaggccttctttggaaacgggtttttttcatataaggctagacagaagaattcccagtaacttccttgtgttgtgtacattcaactcacagagttgaacgttcccttagacagagcagatttgaaacactctttttgtgcaattggcaaatggagatttcaagcgctataagttcaatggcagaaaaggaaatatcttcgtttcaaaactagacagaatgattctcacaaactcctttgtgatgtgtgcgttcaactcacagagtttaacctttcttttcatagagtagttaggaaacactctgtttgtaaagtctgcaagtggatattcagacctgtttgaggccttcgttggaaacgggatttcttcatactgtgctagacagaagaattctcagaaacttccttgtgttgtgtgtattcaactcacagagttgaacgacgctttacacagagcagacttgaaacactctttttgtggaatttgcaagtggggatttcagccgctttgaggtcaatggtagaatagggaatatcttcctatagaaactagacagaatgattctcagaaactcctttgtgatgtgtgcgttcaactcacagagtttaacttttcttttcatagagcagttaggaaacactctgtttgtaaagtctgcaagtggatattcagacctctttgaggccttcgttggaaacgggatttcttcattttctgctagacagaagaattctcagtaacttccttgtgttgtgtgtattcaactgacagagttgaactttcatttagagagagcagatttgaaacactgtttttgtggaatttgccagtggagatttcaagcgctttggggccaaaggcagaaaaggaaatatcttcgtataaaaactagacagaatcattctcagaaactgctgcgtgatgtgtgcgttcaactctcagagtttaactttccttttcattcagcggtttggaaacactctgtttgtaaagtctgcacgtggatattttgaccacttagaggccttcgttggaaacgggtttttttcatgtaaggctagacagaagaattcccagtaacttccttgtgttgtgtacattcaactcacagatttgaacgttcccttagacagagcagatttgaaacactctttttgtgcaattggcaaatggagatttcaagcgctttaaggtcaatggcagaaaagggaatatcttcgtttcaaaactagacagaatgattgtcataaactcctttgtgatgtgtgcgttcaacacacagagtttaacctttctgttcatagagcagttaggaaacattctgtttgtaaagtctgtaagtggatattctgacatcttgtggccttcgttggaaacgggatttcttcatattctgttagacagaagaattctcagaatcttccttctgttgtgtgtattcaactcagagagttgaatgatcctttacacagagcagacttgaaccactctttttgtggaatttgcaagtggagattacagccgctttgaggtccatggtagaaaaggaaatatcttcgtataaaaactagacagaatgattctcagaaacttctttgtgatgtgtgcgttcaactcacagagtttaacctttcttttcatagagcagttgggaaacactctgtttttaaagtctgcaagtggatattcagacctactttgaggccttcgttggaaacgggtttttttcatgtaaggctagacagaagaattcccagtaacttccttgtgttgtgtgtgttcaactcacaggagttgaactttcatttacacagagcagatttgaaacactctttttgtggaatttgcaagtggagatttcaagcgctttgaggccaaaggcagaaaaggaaatatcttcgtttcaaaactagacagaatgattctcagaaactgctctgcgatgtgtgcgttcacctctcagagtttaacttttcttttcattcagcagtttggaaacactctgtttgtaaagtctgcacgtgcataatttgaccacttagaggccttcgttggaaacgggtttttttcatgtaaggctagacagaagaattcccagtaacttccttgtgttgtgtgcattcaactcacagagatgaacgttcccttagacagagcagatttgaaacactctatttgtgtaatttgcaagtgtagatttcaagcgctttaaggtcaatggcagaaaaggatatatctccgtttcaaaactagacagaatcattcccacaaactgcgttgtgatgtgttcgttcaactcacagagtttaacctttctgttcttagagcagttaggaaacactctgtttgtaaagtctgtaagtggatattctgacatcttgtggccttcgttggaaacgggatttctttatattctgctagacagaagaattctcagcaacttccttgtgttgtgtgtattcaactcacagagttgaacgatcctttacacagagcagacttgaaacactctttttgtggaatttgcaagtggagatttcagccgctttgaggtcaatggtagaataggaaatatcttcctatagaaactagacagaatgattctcagaaactcctttgtgatgtgggcgttcgaactcacagagtttaacctttcttttcatagagcagttaggaaacactctgtttgtaaagtctgcaagtggatattcagacatctttgaggctttcgttggaaactggatttcttcatattctgctatacagaagaattcccagtaacttccttgtcttgtgtgtgttcaactcccagagttgaactttcatttacacagagcagatttgaaacactctttttgtggaatttgcaagtggagatttcaagcgctttgaggccaaaggcagaaaaggaaatatcttcgtttcaaaactagacagaatcattctcagaaactgctgcgtgatgtgtgcgttcaactctcagagtttaacttttcttttcattcagcggtttggaaacactctgtttttaaagtctgcacgtggatattttgaccacttagaggccttcgttggaaacgggttttttttcatgtaaggctagacagaagaattctcagtaacttccttgtgttgtgtgtattcaactcacacagttgaacgatcctttacacagagcagacttgtaacactctttttgtgggatttgcaagtggagatttcagccgctttgaagtcaaaggtagaaaaggaaatatcttcctataaaaactagacagaatcattcccacaaactgcgttgtgatgtgttcgttcaactcacagagtttaacctttctgttcatagagcagttaggaaacactctgtttgtaaagtctgcaagtggatattcagacctctttgaagccttcgatggaaacgggatttcttcatattctgctagacagaagaattctcagtaacttcgtggtgttgtgtgttttcaactcacagagttgaatgatcctttacacagaacagtcttgaaacactctttttgtggaatttgcaagtggagatttcagccgctttgaggtcaatggtagaataggaaatatcttcctatagaaactagacagaatgattctcagaaactcctttgtgatgtgtgcgttcaactcacagagtttaacctttcttttcatagagcagttaggaaacactctgtttgtaaagtctgcaagtggatattcagacctctttgaagccttcgttggaaacgggatttcttcatattctgctagacagaagaattctcagtaacttccttgtgttgtgtgtattcaactcacagagttgaacgaacctttacacagagcagacttgaaacactctttttgtggaatttgcaagtggagatttcagccgctttgaggtcaattgtagaaaaggaaatatcttcgtagaaaaactagacagaatcattctcagaaactgctctgcgatgtgtgcgttcaactctcagagtttaacttttcttttcattcagcagtttggaaacactctgtttgtaaagtctgcacgtggataatttgaccacttagaggacttcgttggaaacgggtttttttcatgtaaggctagacagaagaattctcagtaacttccttgtgttgtgtgtattcaactcacagagttgaacgttcccttagacagagcagatttgaaacactctttttgtgcaattggcaagtggagatttcaagcgctttaaggtcaatggcagaaaaggaaatatcttcgtttcaaaactagacagaatgattctcagaaacttctttgtgatgtgtgcgttcaactcacagagtttaacctttcttttcatagagcagttaggaaacactctgtttgaaaactctgcaagtggatgttcagacctctttgaggccttcgttggaaacgggatttcttcatactatgctagacagaagaattctcagtaacttccttgtgttgtgtgtattcaactcacagagttgaacgatcctttacacagagcagacttgtaacactctttttgtggaatttgcaagtggagatttcagccgctttgacgtcaaaggtagaaaaggaaatatcttcctataaaaactagacagaatgattctcagaaactcctttgtgatgtgtgtgttcaactcacagagtttaacctttcttttcatagagcagttagtaaacactctgtttataaagtctgcaagtggatattcagacccctttgaggccttcgttggaaacgggttttcttcatattctgctagacagaagaattctcagtaacttcccttgtgttgtgtgtattcaactcacagaattgaatgatcctttacacagagcggacttgaaacactctttttgtggaatttgcaagtggagatttcagccgttttgagttcaatggtagaataggaaatatcttcctatagaaactagacagaatcattctcagaaactgctctgcgatgtgtgcgttcaactctcagagtttaacttttcttttcattcagcagtttggaaacactctgtttgtaaagtctgcacgtggatattttgaccatttagaggccttcgttggaaacgggtttttttcttgtaaggctagacagaagaattcccagtaacttccttgtgttgtgtacattcaactcacagagttgaacgttcccttagacagagcagatttgaaacactctttttgtgcaattggcaagtggtgatttcagcctctttgaggtcaatggtagaaaaggaaatatcttcgtataaaaactagacagaacgattctcagaaactcctttgtgatgtgtgcgttcaactcacagagtttaacttttcttctcatagagcagttaggaaacactctgtttgtaaagtctgcaagtggatattcagacctctttgaggccttcgttggaaacgggatttcttcatattttgctagacagaagaattctcagtaacttccttgtgttgtgtgtattcaactcacagagttgaacgatctcttacacagagcagagttgaaacactctttttctggaatttgcaagtggagatttcagccgctttgaggtcaatggtagaataggaaatatcttcctatagaaactagacagaatgattctcagaaactcctttgtgatgtgtgcgttcaactcacagagtttaacctttcttttcatagagcagttaggaaacactctgtttgtaaagtctgcaagtggatactcagacctctttgaggccttcgttggaaacgggtttttttcatataaggctagacagaagaattcccagtaacttccttgtgttgtgtgtgttcaactcacagagttgaactttcatttacacagagcagatttgaaacactctttttgtggaatttgcaaatggagatttcaagcgctttgaggccaaaggcagaaaaggaaatgtcttcgtttcaaaagtagacagaatcattctcagaaactgctctgcattgtgtgtgttcaactctcagagtttaacttttcttttcattcagcagtttgaaaacactctgtttgtaaagtctgtacgtggataatttgaccacatagaggccttcgttggaaacgggtttttttcatgtaaggctagacagaagaattctcagtaacttccttgtgttgtgtgtattcaactcacagagttgaacgatcctttacacagagcagacttgtaacactctttttgtggaatttgcaagtggagatttcagccgctgtgaagtcagaggtagaaaaggaaatatcttcctataaaaactagacagaatcattcccacaaactgcgttgtgatgtgttcgttcaactcacagagtttaacctttccgttcatagagcagttaggaaacactctgtttgtaaagtctgtaagtggatattgtgacatcttgtggccttcgttggaaacgggatttcttcatattctgctagacagaagaattctcagtaactgccttgtgttgtgtgtattcaactcacagagttgaacgatcctttacacagagcagacttgaaacactccttttgtggaatttgcaagtggagatttcagccgctttgaggtcaatggtagaataggaaatatcttcttatagaaactagacagaatgattctcagaaactcctttgtgatgtgtgcattcaactcacagagtttaacctttcttttcatagagtagttaggaaacactctgtttgtaaagtctgcaagtggatattcagacctccttgaggccttcgttggaaacgggatttcttcatattatgctagacagaagaattctcagtaacttccttgtgttgtgtgtattcaactgacagagttgaactttcatttagacagagcagatctgaaacactctttttgtggaatttgcaagtggagatttcaagcgctttgaggccaaaggccgaaaaggaaatatcttcgtataaaaactagacagaatcattctcagtaactgctctgcgatgtgtgcgttcaactctcagagtttaacttttcttttcattcagcagtttggaaacactctgtttgtaaagtctgcacgtggatattttgaccacttagaggccttcgttggaatcgggtttttttcctgtaaggctagacagaagaattcccagtaacttacttgtgttgtgtacattcaactcacagagttgaacgttcccttagacagagcagatttgaaacactctttttgtgcaattggcaagtggtgatttcagctgctttgaggtctatggtagaaaagggaatatcttcgtataaaaactagacagaatgattctcagaaactcctttgtgatgtgtgcgttcaactcacacagtttaacctttcttttcatagagcagttagaaaacactctgtttgtaaagtctgcaagtggatattcagacctccttgaggcattcgttggaaacgggatttcttcatattatgctagacagaagaattctcagtaacttccttgtgttgtgtgtattcaactcacagagttgaacgatcctttacacagagcagacttgaaacactctttttgtggaatttgcaagtggagatttcagccgctttgaggtcaatgttagaataggaaatatcttcctatagaaactagacagagtgattctcagaaactcctttgtgatgtgtgcgttcaactcacagagtttaacctttcttttcatagagcagttaggaaacactctgtttgtaaagtctgcaagtggatattcagagctccttgaggccttcgttggaaacgggatttcttcatattctgctatacagaataattctcagtaacttccttgtgttgtgtgtattcaactcacagagttgaacaatcctttacacagagcagacttgaaacattctttttgtggaatttgcaagtggagatttcagccgctttgaggtcaatggtagaataggaaatatcttcctatagaaactagacagaatcattctcagaaactgctctgtgatgtgtgcgttcaactcacagagtttaacttttcttttcattcagcagtttggaagcactctgtttgtatagtctgcaagtggatatattgaccactttgaggccttcgttggaaacggttttttttcatgtaaggctagacagaagaattcccagtaacttccttgtgttgtgtacattcaactcacagagttgaacgttcccttagagagagcagatttgaaatactctttttgtgcaattggcaagtggagatttcaagcgctttaaggtcaatggcagaaaaggaaatatcttcgtttcaaaactagacagaatcattcccacaaactgcgttgtgatgtgttcgttcaactcacagagtttaacctttcttttcatagagcagttaggaaacactctgttggtaaattctgtaagtggatattctgacattttgtggccttcgttggaaacgggatttcttcatattctgctagacagaagaatgctcagtaacttccttgtgttgtgtgtattcaactcacagagttgaacgatcctttacacagagcagacttgaaacactctttttgtggaatttgcaagtggagatttcagccgctttgaggtcaatggtagaaaaggaaactatcttcatataaagattagacagaatgattctcagaaactcctttgtgatgtgtgtgttcaactcacagagtttaacctttcttttcatagagcagttaggaaacactctgtttgtaaagtctgcaagtggatattctgacctctttgaggccttcgttggaaacgggtttttttcatataaggctagacagaagaattctcagtaacttccttgtgttgtgtgtattcaaatgacagagttgaatttcatttagagagagcagatttgaaacactgtttttgtggaatttgcaagtggagatttcaagcgctttggggccaaaggcagaaaaggaaatatcttcgtataaaaactagacagaatcattctcagaaactgctgcgtaatgtgtgcgttcaactctcagagtttaacttttcttttcattcagcggtttggaaacactctgtttgtaaagtctgcacgtggatattttgaccacttagaggccttcgttgaaaacgggattttttcatgtaaggctagacagaagaattcccagtaacttccttgtgttgtgtgcattcacctcacagagctgaacgttcccttagacagagcagatttgaaacactctatttgtgcaatttgcaagtgtagatttcaagcgctttaaggtcaatggcagaaaaggaaatatcttcgtttcaaaactagacagaatgattctcagaaactcctttctgacgtgtgcgttcaactcacagagtttaacctttcttttcatagagcagttaggaaacactctgtttgtaaagtctgaaagtggatattcagacctctttgaggccttcgttggaaacgggatttcttcatattatgcctgacagaagaattctcagtaacttaccttgtgttgtgtgtattcaactcacagagttgaacgatcctttacacagagcagacttgaaacactctttttctggaatttgcaagtggagatttcagccgctttgaggtcaatggtagaataggaaatatcttcttatagaaactagacagaatgattctcagaaactcctttgtgatgtgtgcgttcaactcacagagtttaacttttcttttcatagagcagttaggaaacactctgtttgtaaagtctgcaagtggatattcagacctctttgaggccttctttggaaacgggatttcttcatattatgctagacagaagaattcccagtaacttccttgtgttgtgtgtgttcaactcacagagttgaactttcatttacacagagcagatttgaaacactctttttgtggaatttgcaaatggagatttcagccgcgttgaggtaaatggtagaaaaggaaatatcttcgtttcaaaactagacagaatcattctcagaaactgctctgcgatgtgtgcgttcaactctcagagtttaacttttcttttcattcaacagtttggaaacactctgtttgtaaagtctgcacgtggatattttgaccacttagaggccttcgttggaaacgggtttttttcctgtaaggctagacagaagaattcccagtaacttccttgtgttgtgtgcattcaactcagagagttgaacgttcccttagacagagcagatttgaaacactctatttgtgcaatttgcaagtgtagttttcaagctctttaaggtcaatggcagaaaaggaaatatcttcgtttcaaaactagacagaatgattctcagagactcctttgtgatgtgtgcgttcaactcacagagtttaacctttcttttcatagagcagttgggaaacactctgtttgtaaagtctgcaagtggatattcagacatccttgaggctttcgttggaaacgggatttcttcatattctgctagaaagaaaaattctcagtaacttccttgtgttgtgtgtattcaactcacagaattgaacgatcctttacacagagcagacttgaaacactctttttgtggaatttgcaagtggagatttcagccgctttgaggtcaatggtagaaaaggaaatatcttcgtataaagactagacagatagattctcagaaactcctttgtgatgtgtgcgttcaactcacagagtttaacctttcttttcatagagcagttaggaaacactctgtttgtaaagtctgcaagtggatattcagccctctttgaggccttcgttggaaacgggtttttttcatataaggctagacagaagaattctcagtaacttctttctgttgtgtgtattcaactgacagagttgaactttcatttagagagagcagatttgaaacactgtttttgtggaatttgcaagtggagattataagcgctttggggccaaaggcagaaaaggaaatatcttcgtataaaaactagacagaatcattctcagaaactgctctgtgatgtgtgcgttcaactctcagagtttaacttttcttttcattcagcagtttggaaaccctctgtttgtaaagtctgcacgtggatattttgaccacttagaggccttcgttggaaacgggtttctttcctttaaggctagacagaagaattctcagtaacttccttgtgttgtgtgcattcaactcacagagttgaacgttcccttagacagagcagatttgaaacagcctatttttgcaatttgcaagtgtagatttcaagcgctttaaggtcaacggctgaaaaggaaatatcttcctttcaaaactagacagaatcattcccacaaactgcgttgtgatgtgttcgttcaactcacagagtttaagctttctgttcatagagcagttaggaaacactctgtttgtaaagtctgtaagtggatattctgacatcttgtggccttcgttggaaacgggatttcttcatattctgctagacagaagaattctcaggaacttccttgtgttgtgtgttttcaactcacagagttgaacgatcctttacacagagcagacttgaaacactcttttggtggaatttgcaagtggacatttcagccgctttgaggtcaatggtagaaaaggaaatatcttcgtataaaaactagacagaatgattctcagaaactcctttgtgatgtgtgcgttcaactcacagagtttaacctttcttttcatagagcagttgggaaacactctgtttgtaaagtctgcaagtggatattcagacttctttgaggccttcgttggaagcggggtttcttcatattctgctagacagaagaattctcagtaacttccttgtgttgtgtgtattcaactcacagaattgaacgatcctttacacagagcagacttgaaacactctttttgtggaatttgcaagtggagatttctgccgctttgaggtcaatggtagaaaaggaaatatcttcgtataaaaactagacagaatcattctaagaaactgctctgcgatgggtgtgttcaactctcagagtttaacttttcttttccttcagcagtttggaaacactctgtttgtaaagtctgcacgtggataatttgaccacttagaggccttcgttggaaacgggtttttttcatgtaagtctagacagaagaattcccagtaacttccttgtgttgtgtacattcaactcacagagttgaacgttcccttagacagagcagatttgaaatactctttttgtgcaattggcaagtggagatttcaagcgctttaaggtcaatggcagaaaaggaaatatcttcgtttcaaaactagacagaatcattcccacaaactgcgttgtgatgtgttcgttcaactcacagagtttaacctttcttttcatagagcagttaggaaacactctgttggtaaattctgtaagtggatattctgacatcttgtggccttcgttggaaacaggatttcttcatattctgctacacagaagaattctcagtaacttccttgtgttgtgtgtattcaactcacagagttgaacgatcctttacacagagcagacttgtaacactctttttgtggaatttgcaagtggagatttcagccgctttgaagtcaaaggtagaaaaggaaatatcttcctataaaaaatagacagaaatgattctcagaaacttctttgtgatgtgtgcgttcaactcacagagtttaacctttcttttcatagagcagttaggaaacactctgtttgtaaactctgcaagtggatattcagacctctttgaggccttcgttggaaacgggatttcttcatactatgctagacagaagaattcccagtaacttccttgtgttgtgtgtgttcaactcacagcagttgaactttcatttacacagagcagatttgaaacactctttttgtggaatttgcaagtggagatttcaagcgctgtgaggccaaaggcagaaaaggaaatatcttcgtataaaaactagacagaatcattctcagaaagtgctctgcgatgtgtgcgttcaactctcagagtttaactttgcttttcattcagcagtttggaaacactctgtttgtaaagtctgcacgtggataatttgaccacttagaggccttcgttggaaacgggtttttttcatgtaaggctagacagaagaattcccagtaacttccttgtgttgtgtacattcaactcacagagttgaacgttcccttagacagagcagatttgaaacactctttttgtgtaattggcaaatggagatttcaagcgctttaaggtcaatggcagaaaaggaaatatcttcgtttcaaaactagacagaagcattcccacaaactgcgttgtgatgtgttcgttcaactcacagagtttaacctttcttttcatagagcagttaggaaacagtctgtttgtgaattctgtaagtggatattctgacatcttgtggccttcgttggaaacgggatttcttcatattctgctagacagaagaattctcagaatcttccttgtgttgtgtgtattcaactcacagagttgaacgatggtttacacagagcagatttgaaacactctttttgtggaattttcaagtggagatttcagccgctttgaggtcaatggtagaaaaggaaatatcttcgtataaaaactagacagaatgattctcagaaacttctttgtgatgtgtgcgttcaactcacagagtttaacctttcttttcatagagcagttaggaaacactgtgtttttaaactgtccaagtggatattcagacctctttgaggccttcgttggaaacgggatttcttcatactgtgctagacagaagaattcccagtaacttccttgtgttgtgtgtgttcaactcacagagttgaactttcatttacacagagcagatttgaaactctctttttgtggaatttgcaaatggagatttcaagcgctttgaggccaaaggcagaaaaggaaatgtcttcgtttcaaaactagacagaatcattctcagaaactgctctgcgatgtgtgcgttcaactctcagagtttaacttttcttttcattcagcagtttggaaacactctgtttgtaaagtctgcacgtggataatttgaccacttagaggccttcattggaaacgggtttttttcatgtaaggctagacagaagaattcccagtaacttccttgtgttgtgtgcattcaactcacagagttgaacgttcccttagacagagcagagttgaaacactctatttgtgcaatttgcaagtgtagatttcaagcgctttaaggtcaatggcagaaaaggaaatatcttcgtttcaaaactagacagaatgattctcagaaactcctttgtgatgtgtgcgttcaactcacacagttcaacctttcttttcatagagcagttgggaaacactctgtttgtaaagtctgcaagtggatattcagacttctctgaggccttcgttggaagcgggatttcttcatgttctgctagacagaagaattctcagtaactgccttgtgttgtgtgtattcaactcacagagttgaacgatcctttacactcagcagacttgaaacactctttttgtggaatttgcaagtggagatttcagccgctttgaggtcaatggtagaataggaaatatcttcctatagaaactagacagaatgattctcataaactcctttgtgatgtgtgcattcaactcacagagtttcacctttcttttcatagagcagttaggaaacactctgtttgtaaagtctgcaagtggatattcagacctccttgaggtcttcgttggaaacgggatttcttcatattctgctagatagaagaattctcagtaacttccttctgttgtgtgtattcaactcacagagttgaacgatcctttacacagagcagacttgaaacactctttttgtggaatttgcaagtggagatttcagccgctttgaggtcaatggtagaaaaggaaactatcttcgtataaagactagacagaatcattctcagaaactgctgcgtgatgtgtgcgttcaactctcagagtttaacttttcttttcattcagcggtttggaaacactctgtttgtaaagtttgcacgtggatattttgaccacttagaggccttcgttggaaacgggtttttttcatgtaaggctagacagaagaattcccagtaacttccttgtgttgtgtgcattcaactcacagagttgaacgttcccttagacagagcagatttgaaacagcctatttgtgcaattgcaagtgtagatttcaagctctttaaggtcaacggcagaaaaggaaatatcttcgtttcaaaactagacagaatcattcccacaaactgcgttgtgatgtgttcgttcaactcacagagtttaacctttgttttcatagagcagttaggaaacagtctgtttgtcaattctgtaagtggatattctgacatcttgtggccttcgttggaaacgggatttcttcatattctgctagacagaagaattctcagtaacttccttgtgttgtgtgtattcaactcacagagttgaacgatcctttacacagagcagacttgaaacactctttttgtgaaatttgcaagtggagatttcagccgctttgaggtcaatagtagaaaaggaaatatcttcgtagaaaaactagacagaatgattctcagaaactcctttgtgatgtggtgttcaactcacagagtttaacctttcttttcatagagcagttagtaaacactctgtttataaagtctgcaagtggatattcagacccctttgaggccttcgttggaaacgggatttcttcatattatgctagacagaagaattcccagtaacttccttgtgttgtgtgtgttcaactcacagagttgaactttcatttacacagagcagatttgaagcactctttttgtggaatttgcaggtggagatttcaagcgctttgaggccaaaggcagaaaaggaaatatcttcgtataaaaactagacagaatcattctcagaaactgctctgcgatgtgtgcgttcaagtctcagagtttaacttttcttttcattcagcagtttggaaacactctgtttgtaaagtctgcacgtggataatttgaccacttagaggccttcgttggaaacgggtttttttcatgtaaggctagacagaagaattctcagtaacttccttgtgttgtgtgtattcaactcacacagttgaacgatcctttacacagagcagacttgtaacactctttttgtggaatttgcaagtggagatttcagccgctttgaagtcaaagtagaaagggaaatatcttcctataaaaactagacagaatcattcccacaaactgcgttgggatgtgttcgttcaactcacagagtttaacctttcttttcatagagcagttaggaaacagtctgtttgtcaattctgtaagtggatattctgacatcttgtggccttcgttggaaacgggatttcttcatattctgctagacagaagaattctcagtaacttccttgtgttgtgtgtattcactcacagagttgaacgatcctttacacagagcagacttgtaacactctttttgtggaatttgcaagtggagatttcagccgctttgaagtcaaaggtagaaaaggaaatatcttcctataaaaactagacagaatgattctcagaaactcctttgtgatgtgtgcgttcaactcaaagagtttaacttttcttttcatagagcagttaggaaacactctgtttgtatagtctgcaagtggatattcagacctatttgaggccttcgttggaaacgggatttcttcatattatgctagacagaagaattcccagtatcttccttgtgttgtgtgtgttcaactcacagagttgaactttcatttacacagagcagatttgaaacactctttttgtggaatttgcaagtggagatttcaagcgctgtgaggccaaaggcagaaaaggaaatatcttcgtataaaaactagacagaatcattctcagaaactgctctgcgatgcgtgcgttcaactctcagagtttaacttttgttttcattcagcagtttggaaacactctgtttgtaaagtctgcacgtggataatttgaccacttataggccttcgttggaaacgggtttttttcctgtaaggctagacagaagaattcccagtaacttccttgtgttgtgtgcattcaactcacacagatgaacgttcccttagacagagcagatttgaaacactctatttgtgcaatttgcaagtgtagatttcaagcgctttaaggtcaatggcagaaaaggaaatatcttcgtttcaaaactagacagaatcattcccacaaactgcgttgtgatgtgttcgttcaactcacagagattaacctttctgttcatagagcagttaggaaacactctgtttgtaaagtccgtaagtggatattctgacatcttgtggccttgtttggaaaccggacttcttcatatactgctagacagaataattctcagtaacttccttgtgttgtgtgtattccactcacagagttgaacgatcctttacagagagcagacttgaaacactctttttgtggaatttgcaagtggagatttcagccgctttgaggtcaatggtagaatagggaatatcttcctatagaaactagacagaatgattctcagaaactcctttgtgatgtgtgtgttcaactcacagagtttaacctttcttttcatagagcagttagtaaacactctgtttataaagtctgcaagtggatattcaggcccctttgaggccttcgttagaaacgggatttcttcatattatgctagacagaagaattctcagtaacttccttctgttgtgtgtattcaagtgacagagttgaactttcatttagagagagcagatttgaaacactgtttttgtggaatttgcaagtggagatttcaagcgctttggggccaaaggcagaaaaggaaatatcttcgtataaaaagtagacagaatcattctcagaaaatgctctgtgatgtgtgcgttgaactctcagagtttaacttttgttttcattcagcagtttggaaatactctgtttgtaaattctgcacgtggatattttgaccacttagaggccttcgttggaaacgggtttttttcatgtaagggtagacagaagaattcccagtaacttccttgtgttgtgtacattcaactcacagagttgaacgttttcttagacagagcagatttgaaacactctttttgtgcaattggcaaatggagatttcaagcgctttaaggtcaatggcagaaaaggaaatatcttcgtttcaaaactagacagaatcattcccacaaactgcgttgtgatgtgttcgttcaactcacagagttttacctttcttttcatagagcagttaggaaacagtctgtttgtcaattctgtaagtggatattctgacatcttgtggccttcgttggaaacgggatttcttcatattctgctagacagaagaattctcagtaacttccttgtgttgtgtgtattcaactcacagagttgaacgatcctttacacagagcagacttgaaacactctttttgtggaatttgcaagtggagatttcagccgctttgaggtcaatggtagaaaaggatatatcttcgtataaagactagacagaatgattctcagaaactcctttgtgttgtgtgtgttcaactcacagagtttaacctttctttccatagagcagttaggaaacactctgtttgtaaagtctgcaagtggatattcagacctcctagaggccttcgttggaaacaggatttcttcatattatgctagacagaagaattcccagtaacttccttgtgttgtgtgtgttcaactcacagagttgaactttcatttacacagagcagatttgaaacactctttttgtggaatttgcaagtggagatttcatgcgctttgaggccaaaggcaaaaaaggaaatatcttcgtttcaaaactagacagaatcattctcagaaactgctctgcgatgtgtgcgttcaactctcagagtttaacttttcttttcattcagcagtttgaaaacactctgtttgtaaagtctgcacgtggatattttgaccacttagaggccttcgttggaaacgggtttttttgcctgtaaggctagacagaagaattcccagtaacttccttgtgttgtgtacattcaactcacagagttgaacgttcccttagacagagcagatatgaaacactctttttgtgcaattggcaaatggagatttcaagcgctttaaggtcaatggcagaaaaggaaatatcttcgtttcaaaactagaccgagtgattctcagaaactcctttgtgatgtctgcgttcaactcacagagtttaacctttcttttcatagaacagttaggaaacactctgtttgtaaagtctgcaagtggatattcagacctccttgaggccttcgttggaaacggtatttcttcatattctgctatacagaagaattctcagaaacttccttgtgttgtgtgtattcaactcacagagttgaacgatcgtttacacagagcagacttgagacactctttttgtggtatttgtaagtggagatttcagccgctttgaggtcaatggtagaaaaggaaatatcttcgtataaaaactagacagaatgattctcagaaactcctttgtgatgtgtgtgttcaactcacagagtttaacctttcttttcatagagcagttaggaaacactctgtttgtaaagtctgcaagtggatattcagacctctttgaggccttcgttggaaacgggatttttcatataaggctagacagaagaattcccagtaacttcccttgtgttgtgtgtgttcaactcacagagttgaactttcatttacacagagcagatttgagacactctttttgtggaatttgctaatggagatttcaagcgctttgaggccaaaggcagaaaaggaaatatcttcgtataaaaactagacagaatcattctcagaaactgctgcgtgatgtgtgcgttcaactctcagagtttaacttttcttttcattcagcagtttggaaacactctgtttgtaaagtctgcacgtggaaattttgaccacttagaggccttcgttggaaacgggtttttttcatgtaaggctagacagaagaattctcagtaacttccttgtgttgtgtgtattcaactcacagagttgaacgatcctttacacagagcagacttgaaacactctatttgtgcaattggcaagtgtagatttcaagcgctttaaggtcaatggcagaaaagggaatatcttcgtttcaaaactagacagaatcattcccacaaactgcgttgtgatgtgttcgttcaactcacagagtttaacctttctgttcatagagcagttaggaaacactctgtctgtaaagtctgcaagtggatattcagacctccttgaggccttcgttggaaacgggatttcttcatattctgctagacagaagaattctcagtaacttccttgtgttgtgtgtattcaactcacagacttgaaggatcctttacagagaggaggcttgaaaccctctttttgtggaatttgcaagtggagatttcagccgctttgaggtcaatggtagaataggaaatatcttcttatagaaactagacaaaatgattctcataaactcctttgtgatgtgtgcgttcaactcacagaagtttaacctttctgttcatagagcagttaggaaacactctgtttgtaaagtctgcaagtggatattcagacctccttgaggccttcgttggaaacgggatttcttcatattctgctagacagaagaattcccagtaacttccttgtgttgtgtgtgttcaactcacagagttgaactttcatttacacagagcagatttgaaacactctttttgtggaatttggaaatggagatttcaagcgctttgaggccaaaggcagaaaaggaaatatcttcgtataaaaactagacagaatcattctcagaaactgctgcgtgatgtgttcgttcaactctcagagtttaacttttcttttcattcagcggtttggaaacactctgtttgtaaagtctgcacgtggatattttgaccacttagaggccttcgttggaaacgggtttttttcatgtaaggctagacagaagaattcccagtaacttccttgtgttgtgtgtgttcaactcacagagttgaactttcatttacacagagcagatttgaaacactctttttgtgcaattggcaaatggagatttcaagcgctttaaggtcaatggcagaaaaggaaatatcttcgtttcaaaactagacagaatcattcccacaaactgcgttgtgatgtgttcgttcaaatcacagagtttaacctttctgttcatagagcagttaggaaacactctgtttgtaaagtctgtaagtggatattctgacatcttgtggcgttcgttggaaacgggatttcttcatcttctgctagagagaagaattctcagtaacttccttgtgttgtgtgtattcaactcacagagttgaacgttcctttacacagagcagacttgaaacactcgttttgtggaatttgcaagtggagatttcagccgctttgaggtcaatggtagaaaaggaaatatcttcgtataaaaactagacagaatgattctcagaaactcctttgtgatgtgtgcgttcaaatcacagagtttaacctttcttttcatagagcagttaggaaacactctgtttgtaaagtctgcaagtggatattcagacctccttgaggccttcgttggaaacgggatttctacatattatgctagacagaagaattcccagtaacttcccttgtgttgtgtgtgttcaactcacagagttgaactttcatttacacagagcagatttgaaacactctttttgtggaatttgcaaatggagatttcaagcgctttgaggccaaaggcagaaaaggaaatgtcttcgtttcaaaactagacagaatcattctcagaaactgctctgcgatgtgtgcgttcaactctcagagtttaacttttcttttcattcagcagtttggaaacactctggttgtaaagtctgcacttggataacttgaccacttagaggacttcgttggaaacgggtttttttacctgtaaggctagacagaagaattctcagtaacttccttttgttgtgtgtattcaactcacagagttgaacgatcctttacacagagcagacttgaaacactctttttgtggaatttgcaagtggagatttcagccgctttgaggtcaatggtagaataggaaatatcttcctatagaaactagacagaatgattctgagaaactcctttgtgatgtgtgcgttcaactcacagagtttaacctttcttttcatagagcagttaggaaacactctgtttgtaaagtctgcaagtggatattcagacatctttgaggccttcgttggaaacgggatttcttcatgttctgctagacaaaagaattctcagtaacttcctagtgttgtgtgtattcaactcacagagttgaacgatcctttacacagagcggacttgaaacactctttttgtggaatttgcaagtggagatttcagccgcgttgaggtcaatggtagaaaaggaaatatcttcgtataaaaactagacagaatgattctcagaaactcctttgtgatgtgtgcgttcaactcacagagtttaacctttcttttaatagagcagttaggaaacactctgcttgtaaagtctgcaagtggatattcagccctctttgaggccttcgttggaaacgggtttttttcatataaggctagacagaagaattctcagtaacttccttgtgttgtgtgtgttcaacacacagagttgaactttcatttacccagagcagatttgaaacactctttttgtggaatttgcaagtggagatttcaagcgctttgaggccaaaggcagaaaaggaaatatcttcgtttcaaaactagacagaatcattctcagaaactgctatgcgatgtgtgcgttcaactctcagagtttaacttttcttttcattcagcagtttggaaacactctgtttgtaaagtctgcacgtggatatttgaccacttagaggccttcgttggaaacgggtttttttcctgtaaggctagacagaagaattctcagtaactttccttgtgttgtgtgtattcaactcacagagttgaacgatcctttacacagagcagacttgtaacactctttttgtggaatttgcaagtggagatttcagccgctttgaagtcaaaggtagaaaagggaatatcttcctataaaaactagacagaattattctcagaaactcctttgtgatgtgtgtgttcaactcacagagtttaacctttcttttcatagagcagttagtaaacactctgtttataaagtctgcaagtggatattcagacccctttgaggccttcgttggaaaagggatttcttcatattatgctagacagaagaattctcagtaacttccttgtgttgtgtgtattcaactcacagagttgaacgatcctttacagagagtagacttgaaacactctttttttggaatttgcaagtggagatttcagccgctttgaggtcaatggtagaataggaaatatcttcctatagaaactagacagaatgattctcataaactcctttgtgatgtgtgcgttcaactcacagagtttaacctttcttttcatagagcagttaggaaacactctgtttgtaaagtctgcaagtggatattcagacctttttgaggccttcgttggaaacgggatttcttcatattctgctagacagaagaattctcagtaacttccttgtgttgtgtgtattcaactgacagagttgaactatcatttagagagagcagatttcaaacactgtttttgtggaatttgcaagtggagatttcaagcgctttggggccaaaggcagaaaaggaaatatcttcgtataaaaactagacagaatcattctcagaatctgctgcgtgatgtgtgcgttcaactctcagagtttaacttttcttttcattcagcggtttggaaacactctgtttgtaaagtctgcacgtggatattttgaccacttagaggccttcgttggaaacgggtttttttcatgtaaggctagacagaagaattcccagtcacttccttgtgttgtgtgcattcaactcacagagttgaacgttcccttcagacagagcagatttgaaacactctatttgtgcaatttgcaagtgtagatttcaagcgctttaaggtcaacggcagaaaaggaaatatcttcgtttcaaaactagacagaatgattctcagaaactcctttgtgatgtgtgcgttcaactcacagagtttaacctttctttttatagagcagttaggaaacactctctaaagtctgcaagtggatattcagacctctttgaggccttcgttggaaacgggatttcttcatattatgctagacagaataattctcagtaacttccttgtgttgtgtgtattcaactcacagagttgaacgatcctttacagagtgcagacttgaaacactctttttgtggaatttgcaagtggagatttcagccgctttgaggtcaatgatagaataggaaatatcttcctatagaaactagacagaatgattctcagaaactcctttgtgatgtgtgcattcaactcacagagtttaacctttcttttcatagagcagttaggaaacactctgtttgtaaagtctgcaagtggatattcagacctctttgaggccttcgttggaaacgggatttcttcatattctgctagagagaagaattctcagtaacttccttgtgttgtgtgtattcaactcaaagagttcaacgatcctttatacagagcagacttgaaacactctttttgtggaatttgcaagcggagatttcagccgctttgaggtcaattgtagaaaaggaaatatcttcgtataaaaactagacagaatcattctcagaaactgctctgcgatgtgtgcgttcaactctcagagtttaacatttcttttcattcagcagtttggaaacactctgtttgtaaagtctgcacgtggataatttgaccacttagaggccttcgttggaaacgggtttttttcatgtaaggctagacagaagaattcccagtaacttccttgtgttgtgtgcattcaactcacagagatgaacgttcccttagacagagcagatttgaaacagtctatttgtgcaatttgcaagtgtagatttcaagcgctttaaggtcaatggcagaaaaggaaatatcttcgtttcaaaactagacagaatcattcccacaaactgcgttgtgatgtgttcgttcaacccacagagtttaacctttctgttcatagagcagttaggaaacactctgtttgtaaagtctgcaagtggatattctgacatcttgtggccttcgttggaaacgggatttcttcatattctgctagacagaagaattctcagtaacttccttgtgttgtgtgtattcaactcacacagttgaacgatcctttacacagagcagacttgtaacactctttttgtggaatttgcaagtggagatttcagccgctttgaagtcaaaggtagaaaaggaaatatcttcctataaaaacaagacagaatgattcttagaaactcctttgtgatgtgtgcgttcaactcacagagtttaacctttcttttcatagagcagttaggaaacactctgtttgtaaagtctgcaagtggatattcagacctctttgaagccttcgttggaaacgggatttcttcatattatgctagacagaagaattctcagtaacttccttgtgttgtgtgtattcaactgacagagttgaactatcatttagagagagcagatttgaaacactgtttttgtggaatttgcaagtggagatttcaagcgctttggggccaaaggcagaaaaggaaatatcttcgtataaaaaatagacagaatcattctcagaatctgctgcgtgatgtgtgcgttcaactctcagagtttaacttttcttttcattcagcggtttggaaacactctgtttgtaaagtctgcacgtggatattttgaccacttagaggccttcgttggaaacgggtttttttcatttaaggctagacagaagaattcccagtaacttccttgtgttgtgtacattcaactcacagcaggtgaacgttcccttagacagagcagatttgaaacactctttttgtgcaattggcaagtggagatttcaagcgctttaaggtcaatggcagaaaaggaaatatcttcgtttcaaaactagacagaatcattcccacaaactgcgttgtgatgtgttcgttcaactcacagagtttaacctttcttttcatagagcagttaggaaacactctgtttgtaaagtctgcaagtggatattcagacctctttgaggccttcgttggaaacgggatttcttcatactgtgctagacagaagtattctcagtaacttccttgtgttgtgtgtattcaactcacagagttgaatcatcctttacacagagcagacttgaaacactctttttgtggaatttgcaagtggagatttcagccgcgttgaggtcaatggtagaaaaggaaatatcttcgtataaaaactagacagaatgattctcagaaactcctttgtgatgtgtgtgttcaactcacagagtttaacatttcttttcatagagcagttaggaaacactctgtttgtaaagtctgcaagtggatattcagacctctttgaggccttcgttggaaacgggtttttttcatataaggctagacagaagaattcccagtaacttccttgtgttgtgtgtgttcaactcccagagttgaactttcatttacacagagcagatttgaaacactctttttgtggaatttgcaaatggagatttcaagcgctttgaggccaaaggcagaaaaggaaatatcttcgtataaaaactagacagaatcattctcagaaactgctctgtgatgtgtgcgttcaactctcagagtttaacttttcttttcattcagcagtttggaaacactctgtttgtaaattctgcacgtggatattttgaccacttagaggccttcgttggaaacgggtttttttcatgtaagggtagacagaagaattcccagtaacttcctgtgttgtgtacattcaactcacagagttgaacgttcccttagagagagcagatttgaaatactctttttgtgcaattggcaagtggagatttcaagcgctttaaggtcaatggcagaaaaggaaatatcttagtttcaaaactagacagaatgattctcagaaactcctttgtgatgtgtgcgttcaactcacagagtttaacctttcttttcatagagcagttaggaaacactctgtttgtaaagtctgcaagtggatattcagacctctttgaggccttcgttggaaacgggatttcttcatattatgctagacacaagaattctcagtaacttccttgtgttgtgtgtattcaactcacagagttgaacgatttcttacacagagcagagttgaaacactctttttctggaatttgcaagtggagatttcagccgctttgaggtcaatggtagaataggaaatatcttcctatagaaactagacagaatgattctcagaaactcctttgtgatgtgtgcgttcaactcacagagtttaacctttcttttcatagagcagttaggaaacactctgtttgtaaagactgcaagtggatattcagacctccttgaggccttcgttggaaacgggatttcttcatattatgctagacagaagaattcccagtaacttccttgtggtgtgtgtgttcaagtcacagagttgaactttcatttacacagagaagatttgaaacactctttttgtggaatttgcaagtggagatttcaagcgctttgaggccaaaggcagaaaaggaaatatcttcgtttcaaaactagacagaatcattctcagaaactgctgcgtgatgtgtgcgttcaactctcagagtttaacttttcttttcattcagcggtttggaaacactctgtttgtaaagtctgcaagtggatattttgaccacttagaggccttcgttggaaacgggtttttttcatgtaaggctagacagaagaattcccagtaacttccttgtgttgtgtacattcaactcacagagttgaacgttcccttagacagagcagatttgaaacactctttttgtgcaattggcaaatggagatttcaagcgctttaaggtcaatggcagaaaaggaaatatctttgtttcaaaactagacagaatgattctcagaaactcctttgtgatgtgtgtgttcaactcacagagtttaacttttcttttcatagagcagttaggaaacacaatgtttgtaaagtctgcaagtggatattcagacctccttgaggccttcgttggaaacgggatttcttcatattatgctagactgaagaattctcagtaacttcccttgtgttgtgtgtattcaactcacagagttgaacgatcctttacacagagcagacttgaaacactctttttgtggaatttgcaagtggagatttcagccgctttgaggtcaacggtagaataggaaatatcttcctatagaaactagacagaaatgattctcagaaactcctttgagatgtgtgtgttcaactcacagagtttaacctttcttttcatagagcagttaggaatcactctgtttgtaaagtctgcaagtggatattcagacctctttgaggccttcgttggaaacgggtttttttcatataaggctagacagaagaattctcagtaacttccttgtgttgtgtgtattcaactgacagagttgaactttcatttagagagagcagatttgaaaaactgtttttgtggaatttgcaagtggagatttcaagcgctttggggcaaaaggcaggaaaggaaatatcttcgtataaaaactagacagaatcactctcagaaactgctctgcgatgtgtgcgttcaactctcagagtttaacttttcttttcattcagcagtttggaaacactctgtttgtaaagtctgcacgtggatatttttaccactcagaggccttcgttggaaacgggtttttttcctgtaaggctagacagaagaattcccagtaacttccttgtgttgtgtacattcaactcacagagtttaacgttcccttagacagagcagatttgaaacactctttttgtgcaattggcaagtggtgatttcatccgctttgaggtcaatggtagaaaaggaaatatcttcgtataaaaactagacagaatcattcccacaaactgcgttgtgatgtgttcgttcatctcacagagtttaacctttcttttcatagagcagttaggaaacactatgtttgtaaattctgtaagtggatattctgacatcttgtggccttcgttggaaacgggatttcttcatattctgctagacagaagaattctcagtaactcccttgtgttgtgtgtattcaactcacagagttgaacgatcctttacacagagcagacttgtaacactctttttgtgtaatttgcaagtggagatttcagccgctttgaagtcaaaggtagaaaaggaaatatcttcctataaaaactagacagaatgattctcagaaactcctttgtgatgtgtgcgttcaactcacagagtttaacctttctgttcatagagcagttaggaaacactctgtttgtaaagtctgcaagtggatattcagacctccttgaggccttcggtggaaacgggatttcttcatattctgctagacagaagaattctcagtaacttccttgggttgtgtgtattcaactcacagagttgaacgatcctttacacagagcagacttgaaacactctttttgtggaatttacaagtggagatttcagccgttttgaggtcaatggtagaaaaggaaatatcttcgtataaagactagacagaatcattctcagaaactgctgcgtgatgtgtgcgttcaactctcagagtttaacttttcttttcattcagcggtttggaaacactctgtttgtaaagtctgcacgtggatattttgaccacttagaggccttcgttggaaacgggtttttttcatgtaaggctagacaaaataattctcagtaacttccttgtgttgtgtgtattcaactcacatagttgaacgatcctttacagagagcagacttgaaacactctttttgtggaatttgcaagtggagatttcagccgctttgaggtcaatggtagaataggaaatatcttcccatagaaaatagacagaatgattatcataaactcctttgtgatgtgtgccttcaactcacagagtttaacctttcttttcatagagcagttaggaaacactctgtttgtaaagtctgcaagtggatattcagacctccttgaggccttcgttggaaacgggatttcttcatattctgctagacagaagaattctcagtaacttccttgtgttgtgtgtattcaactcacagagttgaacgatcctttacaccgagcagacttgaaacactttttttgtggaatttgcaagtggagatttcagccggtttgaggtcaatagtagaaaaggaaatatcttcgtagaaaaactagacagaatgattctcagaaactcctttgtgatgtgtgcgttcaactcacaggagtttaacctttctgttcatagagctggtaggaaacactctgtttgtaaactctgcaagtggatattcagacctccttgaggccttcgttggaaacgggatttcttcatattctgctagacagaagaattcttagtaacttccttgtgttgtgtgtattcaactgacagagttgaactttcatttagagagagcagatttgaaacactgtttttgtggaatttgcaagtggagatttcaagcgctttggggccaaaggcagaaaaggaaatatcttcgtataaaaactaggcagaatcattctcagaaactgctgcgtgatgtgtgcgttcaactctcagagtttaacttttcttttcattcagctgtttggaaacactctgtttgtaaagtctgcacgtggatattttgaccacttagaggccttcgttggaatcgggtttttttcatgtaaggctagacagaagaattcccagtaacttccatgtgttgtgtgcattcaactcacagagttgaacgttcccttagacagagcagatttgaaacactctatttgtgcaatttgcaagtgtagatttcaagcgctttaaggtcaatggcagaaaaggagatatcttcgtttcaaaactagacagaatcattcccacaaactgcgttgtgatgtgttcgttcaactcacagagtttaacctttctgttcatagagcagttaggaaacactctgtttgtaaagtctgtaagtgcatattctgacatcttgtggccttcgttggaaacgggatttcttcatattctgctagacagaagaattctcagtaacttctttgtgttgtgtgtattcaactcacagagttaaacgatcctttacacagagcagacttgaaacactctttttgtggaattttcaagtggagatttcagccgctttgaggtcaatggtagaataggaaatatcttcctatagaaactagacagaatgattctcagaaactcctttgtgatgtgtacgttcaactcacagagttcaacctttcttttcatagagcagttaggaaacactctgtttataatgtctgcaattggatattcagacctctttgaggccttcgttggaaacgggatttcttcatattctgctagacagaagaattcccagtaacttccttgtgttgtgtgtgttcaactcacagagttgaactttcatttacacagagcagatttgaaacactctttttgtggaatttgcaagtggagatttcaagcgctttgaggccaaaggcagaaaaggatatatcttcgtataaaaactagacagaatcattctcagaaactgctctgcgatgtgtgcgttcaactctcagagtttaacttttcttttcattcagcagtttggaaacactctgtttgtaaagtctgcacgtggataacttgaccacttagaggccttcgttggaaacgggtttttttcacgtaaggctagacagaagaattctcagaaacttccttgtgtagtgtatattcaactcacagagttgaacgatcctttacacagagcagacttgaaacactctttttgtggattttgcaagtggagatttcaagcgcttttggggccaaagccagaaaaggaaatatcttcatataaaaactagacagaatcattctcagaaactgctctgcgatgtgtgcgttcaactctcagagtttaacttttcttttcattcagcagtttggaaacactctgtttgtaaagtctgcacgtggataatttgaccacttagaggccttcgttggaaacgggtttttttcatgtaaggcttgacagaagaattctcagtaacttccttgtgttgtgtgtattcaactcacagagttgaccgatcctttacacagagcagacttgtaacactctttttgtggaatttgcaagtggagatttcagccgctttgaagtcaaaggtagaaaagggaatatcttctaataaaaactagacagaatgattctcagaaactcctttgtgatgtgtgtgttcaactcaccgagtttaacctttcttttcatagagcagttagtaaacactctgtttataaagtctgcaagtggatattcagacccctttgaggccttcgttggaaacgggatttcttcatattatgctagacagaagaattctcagtaacttcccttgtgttgtgtgtattcaactgacatagttgaactttcatttagagagagcagatttgaaactctgtttttgtggaatttgcaagtggagatttcaagcgctttggggccaaaggcagaaaaggaaatatcttcgtataaaaactagacagaatcattctcagaaactgctctgtgatgtgtgcattcagctctcagagtttaacttttcttttcattcagcagtttggaaacactctgtttgtaaagtctgcactggatattttgaccacttagaggccttcgttggaaacgggtttttttcatgtaaggctagacagaagaattcccattaacttccttgtgttgtgtgcattcaactcacagagatgaaagatcccttagacagagcagatttgaaacactctatttgtgccatttgcaagtgtagatttcaagcgctttaaggtcaatggcagaaaaggaaatatcttcgtttcaaaactagacagaatcattcccacaaactgcgttgtgatgtgttcgttcaactcacagagtttaacctttctgttcatagagcagttaggaaacactctgtttgtaaagtctgtaagtggatattctgacatcttgtggccttcgttggaaacgggatttcttcatattctggtagacagaagaattctcagtaacttccttgttttgtgtgtattcaactcacagagttgaacgatcctttacagagagcagacttgaaacactctttttgtggaatttgtaagtggagatttcagccgctttgaggtcaacggtagaataggaaatatcttcctattgaaactagacagaatgattctcataaactcctttgtgatgtgtgcgttcaactcacagagtttaacctttcttttcatagagcagttaggaaacactctgtttgtaaagtctgcaagtggatattcagacctccttgaggccttctttggaaacgggatttcttcatattctgatagacagaagaattctcagtaacttccttgtgttgtgtgtattcaactcacagagttgaacgatcctttacagagagcagacttgaaacactctttttgtggaatttgcaagtggagatttcagccgctttgaggtcaatggtagaaaaggaaactatgttcgtataaagactagacagaatgattctcagaaactgctttgtgatgtgtgcgttcaactcacagagtttaacctttcttttcatagagcagttaggaaacactctgtttgtaaagtctgcaagtggatattcagacctctttcaggacttctttggaaacgggatttcttcatattctgctagacagaagaattctcagtaacttccttgtgttgtgtgtattcaactcatagagttgaacgatcctttagaggagagcagtcttgaaacactctttttgtggaatttgcaagtggagatttctgccgctttgaggtcaatggtagaataggaaatatcttcctatagaaactagacagaatgattctcagaaacttctttgtgatgtgtgcgttcaactcacagagtttaacctttcttctcatagagcagttaggaaacactctgtttgtaaagtctgcaattggatattcagacctctttgaggccttctttggaaacgggatttcttcatactgtgctagacagaagaattctcagtaacttccttgtgttgtgtgtattcaactcacagagttgaacgatcctttacacagagcggacttgaaacactctttttgtggaatttgcaagtggagatttcagccgctttgaagtcaaaggtagaaaaggaaatatcttcctataaaaactagacagaaatgattctcagaaactcctttgtgatgtgtgcgttcaactcacagagtttaacctttcttttcatagagcagttaggaaacactctgtttgtaaagtctgcaagtggatattcagacctctttgaggccttcgttggaaacgggtttttttcatataaggctagatagaagaattcccagtaacttccttgtgttgtgtgtgttcaactcacagagttgaactttcatttacacagagcagatttgaaacactctttttgtggaatttgcaaattgagatttcaagcgctttgaggccaaaggcagaaaaggaaatatcttcgtataaaaactagacagaatcattctcagaaactgctctgcgatgtgtgcgttcaactctcaagagtttaacttttcttttcattcagcagtttggaaacactctgtttgtaaagtctgcacgtggatattttgaccacttagaggccttcgttggaaacgggtttttttcctgtaaggctagacagtagaattcccagtaacttccttgtgttgtgtacattcaactcacagagttgaacgttcccttagacagagcagatttgaaacactctttttgtgcaattggcaaatggagatttcaagcgctttaaggtcaatggcagaaaaggaaatatcttcgtttcaaaagtagacagaatcattcccacaaactgcgttgtgatgtgttcgttcaactcacagagtttaacctttctgttcatagagcagttaggaaacactctgtttgtaaagtctgtaagtggatattctgacatccttgtggccttcgttggaaacgggatttcttcatattctgctagacagaagaattctcactaacttccttgtgttgtgtgtattcaactcacagagttgaacgatcctttacacagagcagactggaaacactctttttgtggaatttgcaagtggagatttcagccgctttgaggtcaatggtagaaaaggaaatatcttcgtataaagactagacagagtgattctcagaaactcctttgtgatgtctgcgttcaactcacagagtttaacctttcttttcatagagcagttaggaaacactctgtttgtaaagtctgcaagtggatattcagacctccttgaggccttcgttggaaacgggatttcttcaaattctgctatacagaagaattcccagtaacttccttgtgttgtgtgtgttcaactcacagagttgaactttgatttacacagagcagatttgaaacacactttttgtggaatttgcaagtggagatttcaagcgctttgaggccaaaggcagaaaaggaaatatcttcgtataaaaactagacagaatcattctcagaaactgctgcgtgatgtgtgcgttcaactctcagagtttaacttttcttttcattcagcggtttggaaacactctgtttgtaaagtctgcacgtggaaattttgaccacttagaggccttcgttggaaacgggtttttttcatgtaaggttagacagaagaattcccagtaacttccttgtgttgtgtacattcaactcacagagttgaacgttcccttagacagagcagatttgaaacactctttttgtgcaattggcaaatggagatttcaagcactttaaggtcaatggcagaaaatgaaatatcttcgtttcaaaactagacagaatgattctcagaaactcctttgtgatgtgtgcgttcaactcacagagttcaaccttttttttcatagagcagttgggaaacactctgtttgtaaagtctgcaagtggatattcagacttctttgaggccttcgttggaagcgggatttcttcatattctgctagacagaggaattctcagtaacttccttgtgttgtgtgtattcaactcacagagttgaacgatcctttacacagagcagacttgtaacactctttttgtggaatttgcaagtggagatttcagccactttgaagtcaaaggcagaaaaggaaataacttcctataaaaactagacagaatgattctcagaaactcctttgtgatgtgtgcgttcaactcaccgagtttaccctttcttttcatagagcagttgggaaacactctgtttgtaaagtctgcaagtggatattcagacctccttgaggctttcgttggaaacgggatttcttcatattctgctagaaagaaggattcccagtaacttccttgtgttgtgtgtgttcaactcacagagttgaactttcatttacacagagcagatttgaaacactctttttgtggaatttgcaagtggagatttcaagcgctttgaggccaaaggcagaaaaggaaatatcttcgtttcaaaactagacagaatcattctcagaaactgctctgcgatgtgtgcgttcaactctcagagtttaacttttcttttcattcagcagtttggaaacactctgtttgtaaagtctgcacgtggataacttgaccacttagaggccttcgttggaaacgggtttttttcacgtaaggttagacagaagaattcccagtaacttccttgtgttgtgtacattcaactcacagagttgaacgttcccttagacagagcagatttgaaacactctttttgtgcaattggcaaatggagatttcaagcgctttaagttcaatggcagaaaaggaaatatcttcgtttcaaaactagacagaatcattcccacaaactgcgttgtgatgtgttcgttcaactcacagagtttaacctttctttcatagagcagttaggaaacagtctgtttgtcaattctgtaagtggatattctgacatcttgtggccttcgttggaaacgggatttcttcatattctgctagacagaagaattctcagtaacttccttgtgttatgtgtattcaactcacagggttgaacgatcctttacacagagcagacttgaaacactctttttgtggaatttgcaagtggagatttcagccgctttgaggtcaatggtagaaaaggaaatatcttcgtataaagactagacagaatgattctcagaaactcctttgtgatgtgtgcgttcaactcacagagtttaacctttcttttcatagagcagttaggaaacactctgtttgtaaagtctgcaagtggatattcagacctccttgaggccttggttggaaatgggatttcttcatattctgctagacagaagaattcccagtaacttccttgtgttgtgtgtgttcaactcacagatttgaactttcatttacacagagcagatttgaaacactctttttgtggaagttgcaagtggagatttcaagcgctttgaggccaaaggcagaaaaggaaatatcttcgtttcaaaactagacagaatcattctcagaaactgctgcgtgatgtgtgtgttcaactctcagagtttaactttccttttcattcaccggtttggaaacactctgtttgtaaagtctgcacgtggatattttgaccacttagaggccttcgttggaaacgggtttttttcatgtaaggctagacagaagaattcccagtaacttccttgtgttgtgtacattcaactcacagagttgaacgttcccttagacagagcagatttgaaacactctttttgtgcaattggcaaatggagatttcaagcgctttaagttcaatggcagaaaaggaaatatcttcgtttcaaaactagacagaatcattcccacaaactgcgttgtgatgtgttcgttcaactcacagagtttaacctttctgttcatagagcagttaggaaacactctgtttgtaaagtctgtaagtggatattctgacatcttgtggccttcgttggaaacggggtttcttcatattctgctagacagaagaattctcagtaacttccttgtgttgtgtgtattcaactcacagagttgaaagatcctttacacagagcagacttgaaacactctttttgtggaatttgcaagtggagatttcagccgctttgaggtcaatggtagaaaaggaaatatcttcgtataaagactagactgaatgattctcagaaactcctttgtgatgtgtgcgttcaactcacagagtttaacctttcttttcatagagcagttaggaaacactctgtttgtaaagtctgcaagtggatattcagacatccttgaggctttcgttggaaaggggatttcttcatattctgctagaaagaagaattctcagtaacttccttgtgttgtgtgtattcaactcacagagttgaacgatcctttacacagagcagacttgaaacactctttttgtggaatttgcaagtggagatttcagccgctttgagttcaatggtagaataggatatatcttcctatagaaactagacagaatgattctcagaaaatcctttgtgatgtgtgcgttcaactcaccgagtttaacttttcttttcatagagcagttaggaaacactctgtttgtaaagtctgcaagtggatattcagacctctttgaggccttctttggaaacgggatttcttcatattatgctagacagaagaattctcagtaacttccttgtgttgtgtgtattcaactgacagagttgaactttcatttagagagagcaggtttgaaacactgtttctgtggaatttgcaagtggggatttcaagcgctttggggccaaaggcagaaaaggaaatatcttcgtataaaaactagacagaatcattctcagaaactgctgcgtgatgtgtgcgttcaactctcagagtttaacttttcttttcattcagcggtttggaaacactctgtttgtaaagtctgtacgtggacattttgaccacttagaggccttcgttggaaacgggtttttttcatgtaaggctagacagaagaattcccagtaacttccttgtgttgtgtacattcaactcacagagttgaacgttcccttagacagagcagatttgaaacactctttttgtgcaattggcaagtggagatttcaagcgcgttgaggtcaatggcagaaaaggaaatatcttcgtttcaaaactagacagaatcattcccagaaactgcgttgtgatgtgttcgttcaactcacagagtttaacctttcttttcatagagcagttaggaaacagtctgtttgaaaattctgtaagtggatattctgacatcttgtggccttcgttggaaacgggatttcttcatattctgctagacagaagaattctcagaaacttccttgtgttgtgtgtattcaactcacagagttgaacgatcctttacacagagcagacttgaaacacactttttttggaattttcaagtggagatttcagccgctttgaggtcaatggtagaaaaggaaatatcttcgtataaagaatagacagaatgattctcagaaactcctttgtgatgtgggcgttcaactcacagagtttaacctttcttttcatagagccgttaggaaacactctgtttgtaaagtctgcacgtggatatttggacttctttgaggccttcgttggaaacgggtttttttcatgtaaggctagtcggaagagttcccactaacttccatgtgttgtgtgtgttcaattcacagagttgaactttcatttacacagagcagatttgaaacactctttttgtggaatttgcaaatggagatttcaagcgctttgaggccaaaggcagaaaaggaaatatcttcgtataaaaactagacagaatcattctcagaaactgctgcgtgatgtgtgcgttcaactctcagagtttaacttttcttttcattcagctgtttggaaacactctgtttgtaaagtctgcacgtggatattttgacaacttagaggccttcgttggaaacgggtttttttcatgtaaggctagacagaagaattctcagtaacttccttgtgttgtgtgtattcaactcacagagttgaacgatcctttacacagagcagacttgtaacacactttttgtggaatttgcaagtggagatttcagccgcttcgaagtcaaaggtagaaaaagaaatatcttcctataaaaacaagacagaatcattcccacaaactgcgttgtgatgtgttcattcaactcacagagtttaacctttcttttcatagggcagttaggaaacagtctgtttgtcaattctgtaagtggatattctgacatcttgtggccttcgttggaaacgggatttcttcatattctgctagacagaagaattctcagtaacttccgcgtgttgtgtgtattcaactcacagagttgaacgatcctttacacagagcagagttgaaacactctttttgtggaatttgcaagtggagatttcagccgctttgaggtcaatggtagaaaaggaaatatcttcgtataaaaagtagacagaatgattctcataaactcctttgtgatgtgtgcgttcaactcacagagtttaacctttcttttcatagagcagttaggaaaaactctgtttgaaaagtctgcaagtggatattcagacctccttgaggccttcgttggaaacgggatttcttcatattctgctagacagaacaattctcagtaatttccttgtgttgcgtgtattcaactcacagagttgaacgatcctttacacagagcggacttgaaacactctttttgtggaatttgcaattggagatttcagccgcgttgaggtcaatggtagaaaaggaaatatcttcgtataaaaactagacagaatcattctcagaaaccgctctgtgatgtgtgcgttcaactctcagagtttaacttttctttccattcagcagtttggaaacactctgtttgtaaagtctgcacgtggatattttgactacttagaggtctcggttggaaacgggtttttttcatgtaaggctagacagaagaattcccagtaacttccttgcgttgtgtacattcaactcacagagttgaacgttcccttagacagagcagatttgaaacactctttttgtgcaattggcaagtggagatttcaagcgctttgaggtcaatggcagaaaaggaaatatcttcgtttcaaaactagacagaatcattcccacaaactgcgttgtgatgtgttcgttcaactcacagagtttaacctttcttttcatagagcagttaggaaacagtctgtttgtaaattctgtaagtggatattctgacatcttgtggccttcgttggaaacgggatttcttcacattctgctagacagaagaattctcagtaacttccttgtgttgtgtgtattcaactcacagagttgaactgatcctttacacagagcagacttgaaacactctttttgtggaatttgcaagcggagatttcagccgctttgagttcaatggtagaataggaaatatcttcctatagaaactagacagaatgattctcagaaactcctttgtgatgtgggcgttcaactcacagagtttaacctttcttttcatagagcagttaggaaacactctgtttgtaaagtctgcaagtggatattcagacatctttgaggctttcgttggaaacgggatttcttcatattctgctatacagaagaattctcagaaacttccttgtgttgtgtgtattcaactcacagagttgaacgttcgtttacacagagcagacttgagacactctttttgtggaatttgtaagtggacatttcagccgctttgaggtcaatggtagaaaaggaaatatcttcatataaaaactagacagaatcattctcagaaactgctgcgtgatgtgtgcgttcaactctcaagagtttaacttttcttttcattcagcggtttggaaacactctgtttgtaaagtctgcacgtggatattttgaccacttagaggccttcgttggaaacgggtttttttcatgtaaggctagacagaaggattcccaggaacttccttgtgttgtgtacattcaactcacagagttgaacgttcccttagacagagcagatttgaaacactctttttgtgcaattggcaagtggtgatttcagccgctttgaggtcaatggtagaaaaggaaatatcttcgtataaaaactagacagaatcattcccacaaactgcgttgtgatgtgttcgttcaactcacagagtttaacctttctgttcatagagcagttaggaaacactctgtttgtaaactctgcaagtggatattctgacatcttgtggccttcgttggaaacgggatttcttcacattctgctagacagaagaattctcagtaacttccttgtgttgtgtgtattcaactcacagagttgaacgatcctttacagagagcagacttgaaacactctttttgtggaatttgcaagtggagatttcagccgctttgaggtcaagagtagaaaaggaaatatcttcgtagaaaaactagacagaattattctcctaaactccttcgtgatgtgtgcgttcaaatcacagagttgaacttttcttttcatagagcagttaggaaacactctgtttatatagtctgcaagtggatattcagacccctttgaggccttcgttggaaacgggatttcttcatattatgctagacagaagaattctcagtaacttccttgtgttgtgtgtattcaactgacagagttgaactttcttttagagagagcagatttgaaacactgtttttgtggaattttcaactggagatttcaagcgctttggggccaaaggcacaaaaggaaatatcttcgtataaaaactagacagaatcattctcagaaactgctctgcgatgtgtgcgttcaactctcagagtttaacttttcttttcattcagcagtttggaaacactctgtttgtaaagtctgcacgtggatattttgaccacttagaggccttcgttggaaacgagtattttttcctgtaaggctagacagaagaattcccagtaacttccttgtgttgtgtacattcaactcacagagttgaacgttcccttagacagagcagatttgaaagactctttttctgcaattggcaaatggagatttcaagcgctttaaggtcaatggcagaaaaggaaatatcttcgtttcaaaactagacagaatcattcccacaaactgcgttgtgatgtgttcgttcaactcacagagtttaacctttcttttcatagagcagttaggaaacagtctgtttgtcaattctgtaagtggatattctgacatcttatggccttcgttggaaacgggatttcttcatattctgctagacagaagaattctcagaaacttccttgtgttgtgtgttttcaactcacagagttgaacgatcctttacacagagcagacttgaaacattccttttgtggaatttgcaagtggagatttcagccgctttgaggtcaatggtagaataggaaatatcttcctatagaaactagacagaatgattctcagaaactcctttgtgatgtctgcgttcaactcacagagtttaacctttcttttcatagagcagttaggaaacactctgtttgtaaagtctgcaagtggatattcagacctccttgaggccttcgttggaaacgggatttcttcatattatgctagatagaagaattctcagtaactttccttgtgttgtgtgtattcaactgacagagttgaacgttcatttagagagagcagatttgaaacactgtttttgtggaatttgcaattggagatttcaagcgctttggggccaaaggcagaaaaggaaatatcttcgtataaaaactagacagaatcattctcagaaactgctgcgtgatgtgtgcgttcaactctcagagtttaacttttctttgcattcagcggtttggaaacactctgtttgtaaagactgcacgtggatattttgaccacttagaggccttcgttggaaacgggtttttttcatgtaaggctagacagaagaattcccagtaacttccttgtgttgtgtgcattccactcacagagttgaacgttcccttagacagagcagatttgaaacactctatttgtgcaatttgcaagtgtagatttcaagcgctttaaggtcaatggcagaaaaggaaatatcttcgtttcaaaactagacagaatcattcccacaaactgcgttgtgatgtgttcgttcatctcacagagtttaacctttcttttcatagagcagttaggaaacagtctgtttgtaaattctgtaagtggatattctgacatcttgtggccttcgttggaaacgggatttcttcatattctgctagacagaagaattctcagtaacttccttgtgttgtgtgtattcaactcacagagttgaacgatcctttacagagagcagacttgaaacactctttttgtggaatttgcaagtggagatttcagccgctttgaggtcaatggtagaaaaggaaatatcttcgtataaagaatagacagaatgattctcagaaactcctttgtgatgtgtgtgttcaactcacagagtttaacctttcttttcatagagcagttaggaaacactctgtttgtaaagtctgcaagtgggtattcagacctctttgaggccttcgttggaaacgggtttttttcatataaggctagacagaagaattcccagtaacttccttgtgttgtgtgtgttcaactcacagtagttgaactttcatttacacagagcagatttgaaacactctttttgtggaatttgcaggtggagatttcaagcgctttgaggccaaaggcagaaaaggaaatatcttcgtataaaaactagacagaatcattctcagaaactgctgcgtgatgtgtgcgttcaattctcagagtttaacttttcttttcattcagcggtttggaaacactctgtttgtaaagtctgcacgtggaaattttgaccacttagaggccttcgttggaaacgggtttttttcatgtaaggctagacagaagaattcccagtaacatccttgtgttgtgtacattcaactcacagagttgaacgttcccttagacaaagcagatttgaaacactctttttgtggaatttgcaaatggagatttcaagcgctttaaggtcaatggcagaaaaggaaatatcttcgtttcaaaactagacagaatcattcccacaaatggcgttgtgatgtgttcgttgaactcacagagtttaacctttctgttcatagagcagttaggaaacactctgtttgtaaagtctgtaagtggatattctgacatcttgtggccttcgttggaaacgggatttcctcatattctgctagacagaagaattctcagaatcttccttgtgttgtgtgtattcaactcacagagttgaacgatcctttacacagagcagacttgaaacactctttttatggaatttgcaagtggagatttcagccgctttgaggtcaatggtagaaaaggaaatatcttcctataaaaactagacagaatgattctcagaaaatcttttgtgatgtgtgcgttcaactcacagagtttaacttttcttctcatagagcagttaggaaacactctgtttgtaaagtgtgcaagtggatattcagacctctttgaggccttcgttggaaacgggatttcttcatattatgctagacagaataattctcagtaacttccttgtgttgtgtgtattcaactcacagagttgaacgatcctttacagagagcaggcttgaaacactctttttgtggaatttgcaagtggagatttcagccgctttgaggtcaatggtagaataggaaataccttcttatagaaactagacagaatcattctcagaaaatgctctgtgatgtgtgcgttcaactctcagagtttaacttttcttttcattcagcagtttggaaacactctgtttgtaaagtctgcacgtggatattttgaccacttagaggccttcgttggaaacgggtttttttcatgtaagggtagacagaagaattcccagtaacttccttgtgttgtgtgcattcaactcacagagttgaacattcccttagacagagcagatttgaaacactctatttgtgcaatttgcaagtgtagatttcaagcgctttaaggtcaatggcagaaaaggaaatatcttcatttcaaaactagacagaatcattcccacaaactgcgttgtgatgtgttcgttcaactcacagagtttaacctttcttttcatagagcagttaggaaacactctgttggtaaattctgtaagtggatattcttacatcttgtggccttcgttggaaacgggatttctacatattctgctagacagaagaattctcagtaacttcccttgtgttgtgtgtattcaactcacagagttgaacgatcctttacacagagcagacttgtaacactctttttgtgtaatttgcaagtggagatttcagccgctttgaagtcaaaggtagaaaaggaaatatcttcctataaaaactagacagaatgattctcataaactcctttgtgatgtgtgcgttcaactcacagagtttaacctttctgttcatagagctggtaggaaacactctgtttgtaaagtctgcaagtggatattcagacctccttgcggccttcgttggaaacgggatttcttcatattctgctagacagaagaattcccagtaacttccttgtgttgtgtgtgttcaactcacagagttgaactttcatttacacagagcagatttgaagcactctttttgtggaatttgcaaatggagatttcaagcgcttggaggccaaaggcagaaaaggaaatatcttcgtataaaaactagacagaatcattctcagaaactgctctgtgatgtgtgcgttcaactctcagagtttaacttttcttttcattcagcagtttggaaacactctgtttgtaaagtctgcacgtggataatttgaccacttagaggccttcgttggaaacgggtttttttcatgtaaggctacacagaagaattcccagtaacttccttgtgttgtgtacattcaactcacagagttgaacgttcccttagacagagcagatttgaaacactctttttgtgcaattggcaagtggtgatttcagccgctttgtggtcaatggtagaaaaggaaatatcttcgtataaaaactagacagaatcattcctacaaactgcgttgtgatgtgttcgttcaactcacagagtttaacctttctgttcatagagcagttaggaaacactctgtttgtaaagtctgtaagtggatattctgacatcttgtggccttcgttggaaacgggatttcttcatattctgctagacagaagaattctcagtaacttccttgtgttgtgtgtattcaactcacagagttgaacgatcctttacacagagcagacttgaaacactccttttgtggaatttgcaagtggagatttcagccgctttgaggtcaatggtagaaaaggaaactatcttcgtataaagactagacagaatgattctcataaactcctttgtgatgtgtgcgttcaactcacagagtttaacctttcttttcatagagcagttaggaaacactctgtttgtaaagtctgcaagtggatattcagacctctttgaggccttcgttggaaactggatttcttcatattatgctagacagaagaattcccagtaacttccttgtgatgtgtgtgttcaactcacagagttgaactttcatttacacagagcagatttgaaacactctttttgtggaatttgcaagtggagatttcaagcgctttgaggccaaaggcagaaaaggaaatatcttcgtataaaaactagacagaatcattctcagaaactgctgcgtgatgtgtgcgttcaactctcagagtttagcttttcttttcattcagcggtttggaaacactctgtttgtaaagtctgcacgtggatattttgaccacttagaggccttcgttggaaacgggttttttgcatgtaaggctagacagaagaattcccagtaacttccttgtgttgtgtgcattcaactcacagagttgaacgttcccttagacagagcagatttgaaacactctatttgtccaatttgcaagtgtagatttcaagcgctttaaggtcaacggcagaaaaggaaatatcttcgtttcaaaactagacagaatcattcccacaaactgcgttgtgaggtgttcgttcaactcacagagtttaacctttcttttcatagagcagttaagaaacagtctgtttgtaaattctgtaagtggatattctgacatcttgtggccctcgttggaaacgggatttcttgatattctgctagacagaagaattctcagtaacttccttgtgttgtgtgtattcaactcacagagttgaacgatcctttacacagagcagacttgaaacactgtttttgtggaatttgcaagtggagatttcagccgctttgagttcaatggtagaataggaaatatcttcctatagaaactagacagaatgattctcagaaactcctttgtgatgtgtgtgttcaactcacagagtttaacctttcttttcatagagcagttagtaaacactctgtttataaagtctgcaagtggatattcagacccctttgaggccttcgttggaaacgggatttcttcattttatgctagacagaagaattctcagtaacttccttgtgttgtgtgtattcaactgacagagttgaactttcatttagagagagcagatttgaaacactgtttttgtggaatttgcaagtggagatttcaagcgctttggggccaaaggcagaaaaggaaatatcttcgtgtaaaaactagacagaatcattctcagaaactgctctgcgatgtgtgcgttcaactctcagagtttaactttgcttttcattcagcagtttggaaacactctgtttgtaaagtctgcacgtggataatttgaccacttagaggccttcgttggaaacgggtttttttcatgtaaggctagacagaagaattctcagaaacttcattgtgttgtgtgtattgaactcacagagttgaacaatcctttacacagagcggacttgaaacactctttttgtggaatttgcaagtggagatttcagccgctttgaggtcaatggtagaaaaggaaatatcttcgtatagaaactagacagaatgattctcagaaactcctttgtgatgtgtgcgttcaactcacagagtttaacctttcttttcatagagcagttaggaaacactctgtttgtaaagtctgcaagtggaaattcagacctctttgagaccttcgttggaaacgggatttcttcatattctggtagacagaagaattctcagtaacttcccctgtgttgtgtgtattcaactcacagagttgaacgatcctttacagagagcagacttgaaacactctttttgtggaatttgcaagtggagatttcagccgctttgaggtcaatggtagaataggaaatatcttcccatagaaactagacagaatgattctcagaaactcctttgtgatgtgtgtgttcaactcacagagtttaacctttcttttcatagagcagttagtaaacactctgtttataaagtctgcaagtggatattcagaccccttggaggccttcgttggaaacgggatttcttcatattttgctagacagaagaattctcagtaacttccttgtgttgtgtgtattcaactgacagagttgaactttcatttagagagagcagatttgtaacactgtttttgtggaatttgcaagtggagatttcaagcgctttggggccaaaggcagaaaaggaaatatcttcgtataaaaactagacagaatcattctcagaaactgctctgtgatgtgtgcgttcaactctcagagtttaacatttcttttcattcagcagtttggaaacactctgtttgtaaagtctgcacgtggatattttgaccacttagaggccttcgttggaaacgggtttttttcatgtaaggctagacagaagaattcccagtgacttccttgtgttgtgtgcattcaactcacagagttgaacgttcccttagacagagcagatttgaaacactctatttgtgcaatttgcaagtgtagttttcaagctctttaaggtcaacggcagaaaaggaaatatcttcgtttcaaaactagacagaatcattcccacaaactgcgttgtgatgtgttcgttcaagtcacagagtttaacctttcttttcatagagcagttaggaaacagtctgtttgtcaattctgtaagtggatattctgacatcttgtggccttcgttggaaacgggatttcttcatattctcctagacagaagaattcccagtaacttccttgtgttgtgtgcattcaactcacagagttgaacgatccttcacacagagcagattagaaacactctttttattggaatttgcaagtggagatttcagccgctttgaggtcaacggtagaaaaggaaatatcttcgtataaaaactagacagaatgattctcagaaactcctttgtgatgtgtgtgttcaactcacagagtttaacctttcttttcatagagcagttagtaaacactctgtttataaagtctgcaagtggatattcagacccctttgaggccttcgttggaaacggggtttcttcatattctgctagacagaagaattcccactaacttccttgtgttgtgtgtgttcaactcacagagttgaactttcatttacacagagcagatttgaaacactctttttgtggaatttgcaagtggagatttcaagcgctttgaggccaaaggcagaaaaggaaatatcttcgtttcaaaactagacagaatcattctcagaaactgctctgcgatgtgtgagttcaactctcagagtttaacttttcttttcattcagcagtttggaaacactctgtttgtaaagtctgcacgtggatattttgaccacttagaggccttcgttggaaacgggtttttttcctgtaaggctagacagaagaattcccagtaacttccttgtgttgtgtgtgttcaactcacagagttgaactttcatttacacagagcagatttgaaacactctttttgtggaatttgcaagtggagatgtcaagcgctttaaggtcaatggcagaaaaggaaatatcttagtttcaaaactagacagaatcattcccacaaactgcgttgtgatgtgttcgttcaactcacagagtttaacctttcttttcatagagcagttaggaaacagtctgtttttaaattctgtaagtggatattctgacatcttgtggccttcgttggaaacgggatttgttcatattctgctagacagaagaattctcagtaacttccttgtgttgtgtgtattcaactcacagagttgaacgatcctttacacagagcagtcttgaaacactctttttgtggaatttgcaagtggagatttcagccgctttgaggtcaatggtagaataggaaatatcttcctatagaaactagacagaatgattctcagaaacttctttgtgatgtgtgcgttcaactcacagagtttaacctttcttttcatagagcagttaggaaacactctgtttgtaaactctgcaagtggatattcagacctctttgaggccttcgttggaaacgggatttcttcatactatgctagacaagaagaatcctcagtaacctccttgtgttgtgtgtattcaactgacagagttgaactttcatttagacagagcagatttgaaacactctttttgtggaatttgcaagtggacatttcaagcgcgttgaggccaaaggcagaaaaggaaatatcttcgtataaaaactagacagaatcattctcagaaactgctctgtgatgtgtgcgttcaactctcagagtttaacttttcttttcattcagcagtttggaaacactctgtttgtaaagtctgcacgtggataatttgaccacttagaggccttcattggaaacgggtttttttcatgtaaggctagacagaagaattcccagtaacttccttgtgttgtgtgcattcaactcacagagttgaacgttcccctagacagagcagatttgaaacactctatttgtgcaatttgcaagtgtagttttcaagctcttttaggtcaacggcagaaaaggaaatatcttggtttcaaaactagacagaatgattctcataaactcctttgtgatgtgtgcgttcaactcacagagtttaacctttcttttcatagagcagttaggaaacactctgtttgtaaagtctgcaagtggatattcagacctctttgaggccttcgttggaaacgggatttcttcatattctgctagacaaaagaattctcagtaacttccttgtgttgtgtgcattcaactcacagagttgaacgatcctttacacagggcagacttgaaacactctttttgtggaatttgcaaggggagatttcagcctcattgaggttaatggtagaaaatgaaatatcttcgtatagaaactagacagaatgattctcagaaactcctttgtgatgtgtgcgttcaactcacagagttcaacctttcttttcatagagcagttgggaaacactctgtttgtatagtctgcaagtggatattcagacttctttgaggccttcgttggaagcgggatttcttcatattctgctagacagaagaattctcagtaacttccttgtgctgtgtgtattcaactgacagagttgaactttcatttagagagagcagatttgaaacactgtttttgtggaatttgcaagtggagatttcaagcgctttggggccaaaggcagaaaaggaaatatcttcgtataaaaactagacagaatcattctcagaaactgctgcgtgatgtgtgcgttcaactctcagagtttaacttttcttttcattcagcggtttggaaacactctgtttgtaaagactgcacgtggatattttgaccccttagaggccttcgttggaaacgggtttttttcatgtaaggctagacagaagaattcccagtaacttccttgtgttgtgtacattcaactcacagagttgaacgttcccttagacagagcagatttgaaacactctttttgtgcaattggcaagtggtgatttcagccgctttgaggtcaatggtagaaaaggaaatatcttcgtataaaaactagacagaatgattctcagaaacttcattgtgacgtgtgcgttcaactcacagagtttaacatttcttttcatagagcagttaggaaacactctgtttgtaaagtctgcaagtggatattcagacctctttgaggccttcgttggaaacgggatttcttcatactgtgctagacagaagaattctcagtaacttccttgtgttgtgtgtattcaactcacagagttcaacgatcctttacacagagcagacttgaaacactctttttgtggaatttgcaagtggagatttcagccgctttgaggtcaatggtagaatagggaatatcttcctatagaaactagacagaatgattgtcagaaactcctttgtgatgtgtgcgttcaactcacagactttaacctttcttttcatagagcagttaggaaacactctgtttgtaaagtctgcaagtggatattcagacctccttgaggccttcgttggaaacgggatttcttcatattatgctagacagaagaattctcagtaacttccttgtattgtgtgtattcaactcacagagttgaacgatcctttacacagagcagacttgaaacactcttcttgtggaatttgcaagtggagatttcagccgctttgaggtcaatggtagaataggaaatatcttcctatagaaactagacagaatcattctcagaaactgctctgcgatgtgtgcgttcaactctcagagtttaacttttcttttcattcagcagtttggaaacactctgtttgtaaagtctgcacgtggatattttgaccacttagaggccttcgttggaaacgggtttttttcctgtaaggctagacagtagaattcccagtaacttccttgtgttgagtacattcaactcacagagttgaacgttcccttagacagagcagatgtgaaacactctttttgtgcaattggcaagtggagatttcaagcgctttaaggtcaatggcagaaaaggaaatatcttcgtttcaaaactagacagaatcattcccacaaactgcgttgtgatgtgttcgttcaactcacagagtttaacctttcttttcatagagcagttaggaaacagtctgtttgtaaattctgtaagtggatattatgacatcttgtggccttcgttggaaacgggatttcttcatattctgctagacagaagaattctcagtaacttccttgtgttgtgtgttttcaactcacagagttgaacgatcctttacacagagcagacttgaaacactccttttgtggaatttgcaagtggagatttcagccgctttgaggtcaatggtagaataggaaatatcttcctatagaaagtagacagaatgattctcagaaactcctttgtgatgtgtgtgttcaactcacagagtttaacatttcttttcatagagcagttaggaaacactctgtttgtaaagtctgcaagtggatattcagacctctttgaggccttcgttggaaacgggtttttttcatataaggctagagagaataattctcagtaacttccttgtgttgtgtgtattcaacacacagagttgaacgatcctttacacagagcagacttgaaacactctatttgtagaatttgcaagtggagatttcagccgctttgaggtcaatagtagaaaaggaaatatcttcgtagaaaaactagacagaatgattctcataaactcctttctgatgtgtgcattcaactcacagagtttcacctttcttttcatagagcagttaggaaacactctgtttgtaaagtctgcaagtggatattcagacctccttgaggccttcgttggaaacgggatttcttcttattctgctagacagaagaattcccagtaacttccttgtgttgtgtgtgttcaactcacagagttgaactttcatttacacagagcagatttgaaacactctttttgtggaattcgcaagtggagatttcaagcgctttgaggccaaaggcagaaaaggaaatatcttcgtataaaaactagacagaatcattctcagaaactgctctgcgatgtgtgcgttcaactctcagagtttaacttatcttttcattcagcagtttggaaacactctgtttgtaaagtctgcacgtggataatttgaccacttagaggtcttcgttggaaacgggtttttttcatgtaaggctagacagaagaattcccagtaacttccttgtgttgtgtgtgttcaactcacagagttgaactttcatttacacagagcagatttgaaacactctttttgtggaatttgcaaatggagatttcaagcgctttgaggccaaaggcagaaaaggaaatatcttcgtataaaaagctagacagataatcattctcagaaactgctgtgcgatgtgtgtgttcaactctcagagtttaactttgcttttcattcagcagtttggaaacactctgtttgtaaagtctgcacgtggataatttgaccacttagaggccttcgttggaaacgggtttttttcatgtaaggctggacagaagaattctcagtaacttccttgtgtggtgtgtattcaactcacagagttgaacgatcctttacacagagcagacttgtaaaactctttttgtggaatttgcaagtggagatttcagccgctttgaagtcaaaggtagaaaaggaaatatcttcctataaaaactacacagaatgattctcagaaactcctttgtgatgtgtgcgttcaactcacagagtttaacctttcttttcatagagcagttaggaaacactctgcttgtaaagtctgcaagtggatattcagccctctttgaggccttcgctggaaacgggtttttttcatataaggctagacagaagaattctcagtaacttccttgtgttgtgtgtattcaactcacagagttgaacgatcctttacacagagcagacttgaaacactctttttgtggaatttgcaagtggagatttcagccgctttgagttcaatggtagaataggaaatatcttccctatagaaactagacagaatgattctcagaaactcctttgtgatgtgtgcgttcaactcacagagtttaacctttcttttcatagagcagttaggaaacactctgtttgtaacgtctgcaagtggatattcagacctccttgaggccttcgttggaaacgggatttcttcatattctgctacagagaagaattcccggtaacttccttgtgttgtgtgtgttcaactcacagagttgaactttcatttacacagagcagatttgaaacactctttttgtggaatttgcaaatggagatttcaagcgctttgaggccaaaggcagaaaaggaaatatcttcgtataaaaactagacagaatcattctcagaaactgctctgcgatgtgtgcgttcaactctcagagtttaacttttcttttcattcagcagtttggaaacactctgtttgtaaagtctgcatgtggataacttgaccacttagaggccttcgttggaaacgggtttttttcctgtaaggctagacagaagagttcccagtaacttccttgtgttgtgtgcattcaactcacagagttgaacgttcccttagacagagcagatttgaaacactctatttgtgcaatttgcaagtgtagatttcaagcgctttaaggtcaatggcagaaaaggaaatatcttcgtttcaaaactagacagaatcattcccacaaactgcgttgtaatgtgtgcgttcaactcacagagtttaacctttcttttcatagagcagttaggaaacactctgtttgtaaagtctgtaagtggatattctgacatcttgtggccttcgttggaaacgggatttcttcatattctgctagacagaagaattctcagtaacttccgcgtgttgtgtgtattcaactcacacagttgaacgatcctttacacagagcagacttgaaacactctttttgtggaatttgcaagtggagatttcagccgctttgaggtcaatggtagaaaaggaaatatcttcctataaaaactagacagaatgattctcagaaactcctttgtgatgtgtgcgttcaactcacagagtttaacctttcttttcatagagcagttagaaacactctgtttgtaaagtctgcaagtggatattcagacctccttgaggccttcgttggaagcgggatttcttcatgttcaggtagacagaagaattcccagtaactttccttgtgttgtgtgtgttcaactcacagagttgaactttcatttacacagagcagatttgaaacactctttttgtggaatttgcaagaggagatttcaagcgctttgaggccaaagacagaaaaggaaatatcttcgtataaaaactagacagaatcattctcagaaactgctgcgtgatgtgtgcgttcaactctcagagtttaacttttcttttcattcatcggtttggaaacactctgtttgtaaagtctgcacgtggatattttgaccacttagaggccttcattggaaacgggttttttttcatgtaaggctagacagaagaattcccagtaacttccttgtgtggggtgcattcaactcacagagttgaacgttctcttagacagagcagatttgaaacactctatttgtgcaatttgcaagtgtagatttcaagcgctttaaggtcaatggcagaaaaggaaatatcttcgtttcaaaactagacagaatcattcccacaaactgcgttgtgatgtgttcgttcaactcacagagtttaacctttcttttcatagagcagttaggaaacagtctgtttgtcaattctgtaagtggatattctgacatcttgtggtcttcgttggaaacgggatttcttcatattctgctagacagaagaattctcagtaacttccttgtgttgtgtgtattcaactcacagagttgaaggatcctttacagagagcagacttgaaacactctttttgtggaatttgcaagtggagatttcagccgctttgaggtcaatggtagaaaaggaaatatcttcgtataaaggctagacagaatgattctcagaaactcctttgtgatgtgtgcgttcaacacacagagtttaacttttcttttcatagagaagttagtaaacactctgtttatacagtctgcatgtggatattcagacccctttgaggccttcgttggaaacgggatttcttcatattatgctagacagaagaattcccagtaactttccttgtgttgtgtgtgttcaactcacagagttgaactttgatttacacagagcagatttgaaacactctttttgtggaatttgcaagtggagatttcaagcgctttgtggccaaaggcagaaaaggaaatatcttcgtataaaaactagacagaatcattctcagaaactgctctgtgatgtgtgcgttcaactctcagagtttaacttttcttttcattcagcagtttggaaacactctgtttgtaaagtctgcacgtggataatttgaccacttagaggccttcgttggaaacgggtttttttcatgtaaggctagagagaagaattcccagtaacttccttgtgttgtgtgtattcaactcacagagttgaacgttcccttagacagagcagatttgaaacactctatttgtgcaatttgcaagtgtagatttcaagcgctttatgttcaatggcagaaaaggaaatatcttcgtttcaaaactagacagaatcattcccacaaactgcgttgtgatgtgttcgttcaactcacagagtttaacctttctgttcatagagcagttaggaaacactgtgtttgtaaagtctgtaagtggatattctgacatcttgtggccttcgttggaaaagggatttcttcatattctgctagacagaagaattctcagtaacttccttgtgttgtgtttattcaactcacagagttgaacgatcctttacacagagcagacttgaaacactctttttgtggaatttgcaagtggagatttctgccgctttgaggtcaatggtagaataggaaatatcttcctatagaaactagacagagtgattctcataaactcctttgtgatgtgtgcattcaactcacagagtttaacctttcttttcatagagcagttaggaaacactctgtttgtaaagtctgcaagtggatattcagacctccttgaggccttctttggaaacgggatttcttcatattctgatagacagaagaattcccagtaacttccttgtgttgtgtgtgttcaactcacagagttgaactttgatttacacagagcagattcgaaacactctttttgtggaatttgcaagtggagatttcaagcgctttgaggccaaaggcagaaaaggaaatatcttcgtataaaaactagacagaatcattctcagaaaatgctctgtgatgtgtacgttcaactctcagagtttaacttttcttttcattcagcagtttggaaacactctgtttgtaaagtctgcacgtggatattttgaccacttagaggccttcgttggaaacgggtttttttcatgtaagggtagacagaagaattcccagtaacttccttgtgttgtgtgcattcaactcacagagttgaacgttcccttagacagagcagatttgaaacactctatttgtgcaatttgcaagtgtagatttcaagcgctttaaggtcaacggcagaaaagggaatatcttcgtttcaaaactagacagaatcattcccacaaactgcgttgtgatgtgttcgttcaactcacagagtttaacctttctgttcatacaacagttaggaaacactctgtttgtaaagtctgcaagtggatattcagacctccttgaggccttcgttggaaacgggatttcttcatattctgctagaccgaagaattctcagtaacttccctgtgttgtgtgtattcaactcacagagttgaacgatcctttacacagagcagacttgaaacactctttttgtggaatttgcaagtggagatttcagccgctttgaggtcaatggtagaataggaaatatcttcctatagaaactagacagaatgattctcagaaactcctttgtgatgtgtgcgttcaactcacagagtttaacctttcttttcatagagcagttaggaaacactctgtttgtaaattctgcaagtggatattcagacatctttgaggctttcgttggaaacgggatttcttcatattctgctagacagaagaattctcagtaacttccttgtgttgtgtgtattcaactgacagagttgaacgatcctttacacagagcagacttgaaacactctttttgtggaatttgcaagtggagatttctgccgctttgaggtcaatggtagaataggaaatatcttcctataaaaactagacagaatcattctcagaaactgctctgtgatgtgtgcgttcaactctcagagtttaacttttcttttctttcagcagtttggaaacactctgtttgtaaagtctgcacgtggatattttgaccacttagaggcctgcgttggaaacgggtttttttcatgtaaggctagacagaagaattcccagtaacttccttgtgttgtgtacattcaactcacagagttgaacgttcccttagagagagcagatttgaaatactctttttgtgcaattggcaagtggagatttcaagcgctttaaagtcaatggcagaaaaggaaatatcttcgtttcaaaactagacagaatgattctcagaaacttcattgtgatgtgtgcgttcaactcacagagtttaacctttcttttcatagagcagttaggaaacactgtttttgtaaactctgcaagtggttattcagacctctttgaggccttcgttggaaacgggatttcttcatactgtgctagacagaagaattctcagtaacttccttgcgttgtgtgtattcaactcacagagttgaacgatcttttacagagagcagacttgaaacactctttttgtggaatttgcaagtggagatttcagccgctttgaggtcaatggtagaataggaaatatcttcctatagaaactagacagaatgattctcagaaactcctttgtgatgtgtgcgttcaactcacagagtttaacctttctgttcatagagcagttaggaaacactctgtttgtaaagtctgcaagtggatattcagacctccttgaggccttcgttggaaacaggatttcttcatattatgctagacagaagaattcccagtaacttccttgtgttgtgtgtgttcaactcacagagttgaactttgatttacaaagagcagatttgaaacactctttttgtggaatttgcaagtggagatttcaagcgctttgaggccaaaggcagaaaaggaaatatcttcgtataaaaactagacagaatcattctcagaaactgctgcgtgatgtgtgcgttcaactctcagagtttaacttttcttttcattcagcggtttggaaacactctgtttgtaaagtctgcacgtggaaattttgaccacttagaggccttcgttggaaacgggattttttcatgtaaggctagacagaagaattcccagtaacttccttgtgttgtgtacattcaactcacagagttgaacgttcccttagacagagcagatttgaaacactctttttgtgcaattggcaagtggagatttcaagcgctttgtggtcaatggcagaaaaggaaatatcttcgtttcaaaactacacagaatcattcccacaaactgcgttgtgatgtgttcgttcaactcacagagtttaacctttctgttcatagagcagttaggaaacactctgtttgtaaagtctgtaagtgggtattctgacatcttgtggccttcgttggaaacgggatttcttcatattctgctagacagaataattctcagtaacttaccttgtgttgtgtgtattcaactcacagagttgaacgatcctttacacagagcagacttgaaacactctttttgtggaatttgcaagtggagatttcagccgctttgaggtcaatggtagaataggaaatatcttcctatagaaactagacagaatgattctcagaaaatcctttgtgatgtgtgcgttcaactcacagagtttaacatttcttttcatagagcagttaggaaacactctgtttgtaaagtctgcaagtggatattcagacctctttgaggccttcgttggaaacgggatttcttcatattctgctagacagaagaattctcagtaacttccttgtgttgtgtgtattcaactgacagagttgaactttcatttagagagagcagatttgaaacactgtttttgtggaatttgcaagtggtgatttcaagcgctttggggccaaaggcagaaaaggaaatatcttcgtataaaaactagacagaatgattctcagaaactgctctgcgatgtgtgcgttcaactctcagagtttaacttttcttttcattcagcagtttggaaacactctgtttgtaaagtctgcacgtggatattttgaccacttagaggccttcgttggaaacgggtttttttcctgtaaggctagacagaagaattcccagtaacttccttgtgttgtgtgcattcaactcacagagttgaacgttcccttagacagagcagatttgaaacactctatttgtgcaatttgcaagtgtagatttcaagcgctttaaggtcaatggcagaaaaggaaatatcttcgtataaaaactagtcagaatcattcccacaaactgcgttgtgatgtgttcgttcaactcacagagtttaacctttcttttcatagagcagttaggaaacagtctgtttgtcaattctgtaagtggatattctgacatcttgtggccttcgttggaaacgggttttcttcatattctcctagacagaagaattctcagtaacttccttgtgttgtgtttattcaactcacagagttgaatgatcctttacacagagcagacttgaaactctctttttgtggaatttgcaagtggagatttcagccgctttgaggtcaatggtagaaaagcaaatatcttcgtataaagactagacagagtgattctcagaaactcctttgtgatgtctgcgtttaactcacagagtttaacctttcttttcatagagcagttaggaaacactctgtttgtaaagtctgcaagtggatattcagacctccttgaggccttcgttggaaacgggatttcttcatattatgctagacacaagaattctcagtaacttccttgtgttgtgtgtattcaactgacagagttgaactttcatttagagagagcagatttgaaacactgtttttgtggaatttgcaagtggagattttaagcgctttggggccaaaggcagaaaaggatatatcttcgtataaaaactagacagaatcattctcagaaactgctgcgtgatgtgtgcattcaactctcagagtttaacttttcttttcattcagcggtttggaaacactctgtttgtaaagtctgcacgtggaaattttgaccacttagaggccttcgttggaaacgtgtttttttcatgtaaggctagacagaagaattcccagtaacttccttgtgttgtgtgcattcaactcacagagttgaacgttcccttagacagagcagatttgaaacactctatttgtgcaatttgcaagtgtagttttcaagctctttaaggtcaacggcagaaaaggaaatatcttcgtttcaaaactagacagaatcattcccacaaactgcgttgtgatgtgttcgttcaactcacagagtttaaactttcttttcatagagcagttaggaaacagtctgtttgtcaattctgtaagtggatattctgacatctagtggccttcgttggaaacgggatttcttcatattctgctagacagaagaattctcagtaacttccttgtgttgtgtgtattcaactcacagagttgaacgatcgtttacacagagcaatcatgaaacactctttttgtggaatttgcaagtggagatttctgccgctttgaggtcaatggtggaataggaaatatcttcctatagaaactagacagaatgattctcagaaactcctttgtgaagtgtgcgttcaactcacagagtttaacctttcttttcatagagcagttaggaaacactctgtttgtaaagtctgcaagtggatattcagacctctttgaggccttcgttggaaacgggtttttttcatataaggctagacagaagaattcccagtaacttccttgtgttgtgtgtgttcgactcacagagttgaactttcatttacacagagcagatttgaaacactctttttgtggaatttgcaagtggagatttcaagcgctttgaggcccaaggcagaaaaggaaatatcttcgtttcaaaactagacagaatcattctcagaaactgctctgcgatgtgtgcgttcaactctcagagtttaacttttcttttcattcagcagtttggaaacactctgtttgtaaagtctgcacgtggataatttgaccacttagaggccttcgttggaaacgggttttttcatgtaaggctagacagaagaattcccagtaacttccttgtgttgtgtacattcaactcacagagttgaacgttcccttagacagagcagatttgaaacactctttttgtgcaattggcaagtggagatttcaagtgctttaaggtcaatggcagaaaaggaaatatcttcgtttcaaaactagacagaatcattcccacaaactgcgttgtgatgtgttcgttcaactcacagagtttaacctttcttttcatagagcagttaggaaacagtctgtttgtaaattctgtatgtggatattctgacatcttgtggccttcgttgcaaacgggatttcttcatattctgcttgacagaagaaatctcagaatcttccttgtgttgtgtgtattcaactcacagagttgaacgatggtttacaaagagcagatatgaaacactctatttgtggaatttgcaagtggagatttcagccgctttgaggtccatggtagaaaaggaaatatcttcgtataaaaactagacagaaagattctcagaaattcctttgtgatgtgtgcgttcaactcacagagtttaacctttcttttcatagagcagttaggaaacactctgtttgtaaagtctgcaagtggatattcagacctctttgaggccttcgttggaaacgggtttttttcatataaggctagacagaagaattctcagtaacttccttgtgttgtgtgtattcaactgacagagttgaactttcatttagagagagcagatttgaaacactgtttttgtggaatttgcaagtggagatttcaagcgctttggggccaaaggcagaaaacgaaatatcttcttataaaaactagacagaatcattctcagcaaactcctttgtgatgtgtgcgttcaactctcagaatttaacttttcttttcattcagcggtttggaaacactctgtttgtaaagtctgcacgtggaaattttgaccacttaggggccttcgttggaaacgggtttttttcatgtaaggctagacagaagaattcccagtaacttccttgtgttgtgtgcattcaactcacagagttgaaagttcccttagacagaccagatttgaaacactctatttgtgcaatttgcaagtgtagatttcatgcgctttgaggtcaatggcagaaaaggaaatatcttcgtttcaaaactagacagaatcattcccacaaactgcgttgtgatgtgttcgttcaactcacagagtttaacctttctgttcatagagcagttaggaaacactctgtttgtaaagtctgcaagtggatattcagacctccttgaggccttcgttggaaacgggatttcttcatattctgctagaccgaagaattctcagtaacttccttgtgttgtgtgtattcaactcacagagttgaacgatcctttacacagagcagacttgaaacactctttttgtggaatttgcaaggggagatttcagccgctttgaggtcaatggtagaaaaggaaatatcttcgtataaaaactagacagaatgattctcagaaacttcattgtgatgtgtgcgttcaactcacagagtttaacctttcttttcatagagcagttaggaaacactctgtttgtgaactctgcaagtggatattcagacgtctttgaggccttcgttggaaacgggatttcttcatactatgctagacagaagaattctcagtaacttcccttgtgttgtgtgtattcaactcacagagctgaactttcatttacacagagcagatttgaaacactctttttgtggaatttgcaaatggagatttcaagcgctttgaggccaaaggcagaaaaggaaatatcttcgtataaaaactagacagaatcattctcagaaactgctctgcgatgtgtgcgttcaactctcagagtttaacttttcttttcattcagcagtttggaaacactctgtttgtaaagtctgcacgtggatattttgaccacttagaggcctttgttggaaacgggttttttcctgtaaggctagacagaagaattcccagtaacttccttgtgttgtgtacggttcaactcacagagttgaacgttcccttagacagagcagatttgaaacactctttttgtgcaattggcaagtggagatttcaagcgctttaaggtcaatggcagaaaaggaaatatcttcgtttcaaaactagacagaatgattctcagaaacttctttgtgatgtgtgcgttcaactcacagagtttaacctttcttttcatagagcagttaggaaacactctgtttgtaaagtctgcaagtggatattcagatctctttgaggccttcgttggaaatgggatttcttcatactatgctagacagaagaattctcagtaacttccttgtgttgtgtgtattcaactcacagagttgaacgatcctttacacagagcagacttgtaacactctttttgtggaatttgcaagtggagatttcagccgctttgaagtcaaaggtagaaaaggaaatatcttcctataaaaaatagactgaatgattctcataaactcctttgtgatgtgtgcgttcaactcacagagtttaacctttcttttcatagagcagttaggaaacactctgtttgtaaagtctgcaagtggatattcagacctccttgaggccttcgttggaaaagggatttcttcatattctgctagacagaagaattctcagtaacttccttgtgttgtgtgtattcaactcacagagttgaacgatcctttacacagagcagacttgaaacactctttttgtggaatttgcaagtggagatttcagcccgctttgaggtcaatggttgaaaaggaaatatcttcgtataataaactagacagaatcattctcagaatctgctgcgtgatgtgtgcattcaactctcagagtttaacttttcttttcattcagcggtttggaaacactctgtttgtaaagtctgcacgtggatattttgaccacttagaagccttctttggaaacgggttttcttcatgtaaggctagacagaagaattcccagtaacttccttgtgttgtgttcattcaactcacagagttgaacgttcccttagacagagcagatttgaaacactctttttgtgcaattggcaagtggagatttcaagcgctttaaggtcaatggcagaaaaggaaatatcttcgtttcaaaactagacagaatcattcccacaaactgcgttgtgatgtgttcgttcaactcacagagtttaacctttcttttcatagagcagttaggaaacagtctgtttgtaaattctgtaagtggatattctgacatcttgtggccttcgttggaaacgggatttcttcatattctgctagtcagaagaattctcagtaacttccttgtgtagtgtgtattcaactcacagagttgaacgatcctttacacagagcagacttgaaacactctttttgtggaatttgcaagtggagatttcagccgctttgaggtcaatggtagaaaaggaaatatcttcgtataaagactagacagaatgattctcagaaactcctttgtgatgtgtgcgttcaactcacagagtttaacttttcttttcatagagcagttaggaaacactctgtttgtaaagtctgcaagtggatattcagacctctttgaggccttcgttggaaacgggatttcttcatattatggtagacagaagaattctcagtaacttccttgtgttgtgtgtattcaactcacagagttgaacgatcctttacacagagcagacgtgaaacactctttttgtggaatttgcaagtggagatttcagccgctttgaggtcaatagtagaaaaggaaatatcttcgtagaaaaactagacagaatcattctcagaaactgctctgcgatgtgtgcgttcaactctcagagtttaacttttcttctcattcagcagtttggaaacactctgtttgtaaagtctgcacgtggatattttgaccacttagaggccttcgttggaaacgggtttttttcctgtaaggctagacagaatcattctcagaaactgctctgcgatgtgtgcattcaactctcagagtttaacttttcttttcattcagcagtgtggaaacactctgtttgtaaagtctgcacgtggatattttgaccacttagaggccttcgttggaaacgggtttttttcctgtaaggctagacagaagaattctcagtaacttccttgtgttgtgtgtattcaactcacagagttgaacgacgctttacagagagcagacttgaaacactctttttgtggaatttgcaagtggagatttcagccgcttgaggtcaatggtagaaaaggaaactatcttcgtataaagactagacagaatgattctcagaaactcctttgtgatgtgtgtgttcaactcacagagttgaacctttcttttcatagagcagttagtaaacaatctgtttataaagtctgcaagtggatattcagatccctttgaggccttcgttggaaacgggatttcttcatattatgctagacagaagaattctcagtaacttccttgtgttgtgtgtattcaactgacagagttgaactttcgtttagagagagcagatttgaaacactgtttttgtggaatttgcaagtggagatttcaagcgctttggggccaaaggcagaaaaggaaatatcttcgtataaaaactagacagaatcattctcagaaactgctctgcgatgtgtgcgttcaactcttagagtttaacttttcttttcattcagcagtttggaaacactctgtttggaaagtctgcacgtggataatttgaccacatagaggccttcgttggaaacgggtttttttcatgtaaggctagacagaagaattcccagtaacttccttgtgttgtgtacattcaactcacagagttgagacgttcccttagaccgagcagatttgaaacactctttttgtgcaattggcaagtggagatttcaagcgctttaaggtcaatggcagaaaaggaaatatcttcgtttcaaaactagacagaatgattctcataaactcctttgtgatgtgtgcgttcaactcacagagtttaacctttcttttcatagagcagttagtaaacactctgtttggaaagtctgcaagtggatattcagacctctttgaggccttcgttggaaacgggatttcttcatattctgctagacagaagaattctcagtaacttcccttgtgttgtgtgtattcaactcacagagttgaacgatcctttacacagagcagacttgaaacactctttttgtggaatttgcaagtggagatttcagccgctttgaggtcaatagtagaaaaggaaatatcttcgtagaaaaactagacagaatgattctcagaaactcctttgtgatgtgtgcgttcaactcacagagtttaacctttcttttcatagagcagttaggaaacactctgtttgtaaagtctgcaagtggatattcagacctccttgaggccttcgtttgaaacgggatttcttcatattatgcaagacagaagaattcccagtaacttcttgtgttgtgtgtgttcaactcacagagttgaactttcatttacccagagcagatttgaaacactctttttgtggaatttgcaagtggagatttcaagcgctttgaggccaaaggcagaaaaggaaatatcttcgtttcaaaactagacagaatcattctcagaaactgctgcgtgatgtgtgcgttcaactctcagagtttaacttttcttttcattcagcggtttggaaacactctgtttgtaaagtctgcacgtggatattttgaccacttataggccttcgttggaaacgggtttttttcatgtaaggctagacagaagaattctcagtaactaccttgtgttgtgtgtattcaactcacagagttgaacgatcctttacacagagcagacttgaaacactctatttgtgcaatttgcaagtgtagatttcaagcgctttaaggtcaatggcagaaaaggaaatatcttcgttttaaaactagacagaatcattcccacaaactgcgttgtgatgtgttcgttcaactcacagagtttaacctttctgttcatagagcagttaggaaacactctgtttgtaaagtctgtaagtggatatcctgacatcttgtggccttcgttggaaacgggatttcttcatattctgctagacagaagaattctcagtaacttccttgtgttgtgtgtattgaactcacagagttgaacgatcctttacacagagcagacttgaaacactctttttgtggaatttgcaagtggagatttcagccgctttgaggtcaatggtagaataggaaatatcttcctatagaaactagacagaatgattctcagaaagtcctttgtgatgtgtttgttcaactcacagagtttaacctttcttttcatagagcagttaggaaacactctgtttgtaaagtctgcaagtggatattcagacctctttgaggacttcgttggaaacgggatttcttcatattctgctagacagaagaattcccagtaacttccttgtgttgtgtgtgttcaactcacagagttgaactttcatttacacagagcagatttgaaacactctttttgaggaatttgcaagtggagatgtcaagcgctttgaggccaaaggcagaaaaggaaatatcttcgtttcaaaattagacagaatcattcccacaaactgcgttgtgatgtgttcgttcaactcacagagtttaatctttcttttcatagagcagttaggaaacactctgttggtaaattatgtaagtggatattctgacatcttgtggcctccgttggaaacgggatttcttcatattctgctagacagaagaattctcagaatcttccttgtgttgtgtgtattcaactcacagagttgaacgatcctttacacagagcagacttgaaacactctttttatggaatttgcaagtggagatttcagccgctttgaggtcaatggtagaaaaggaaatatcttcgtataaaaactagacagaatcattctcagaaactgctctgcgatgtgtgcgttcaactctcagagtttaatttttcttttcattcagcagtttggaaacactctctttgtaaagtctgcacgtggatattttgaccacttagaggccttcgttggaaacgggttttattcctgtaaggctagacagaagaattcccagtaacttccttgtgttgtgtgcagtcaactcacagagatgaacgttccctttgacagagcagatttgaaacactctatttgtgcaatttgcaagtgtagatttcaagcgctttaaggtcaatggcagaaaaggaaatattttcgtttcaaaactagacagaatcattcccacaaactgcgttgtgatgtgttcattcaactcacagagtttaaccattcttttcatagagcggttaggaaacactctgtttataaagtctgcaagtggatattcagaccttttgaggccttcgttggaaacgggatttcttcatatgatgctagacagaagaattcccagtaacttccttgtgttgtgtgtgttcaactcacagagttgaaatttcatttacacagagcagacttgtaacactctttttgtggaatttgcaagtggagatttcagccgctttgaagtcaaaggtagaaaaggaaatatcttcgtataaaaactagacagaatgattctcagaaactcctttgtgatgtgtgcgttcaactctcagagttcaacttttcttttcattcagcagtttggaaacactctgtttgtaaagtctgcacgtggatattttgaccacttagaggccttcgttggaaacgggtttttttcctgtaaggctagacagaagaattcccagtaacttcccttgttttgtgtacattcaactcacagagttgaacgttcccttagatagagcagatttgaaacactctttttgtgcaattggctagtggtgatttcagccgctttgaggtcaatggtagaaaaggaaatatcttcgtataaaaactagacagaatcattcccacaaactgcgttgtgatgtgttcgttcaactcacagagtttaacctttctgttcatagagcagttaggaaacactctgtttgtaaagtctgcaagtggatattcagacctccttgaggccttcgttggaaatgggatttcttcatattctgctagacagaataattctcagtaacttccttgtgttgtgtgtattcaactcacagagttgaaggatcctttacagcgaacaggcttgaaacactctttttgtcgaatttgcaagtggagatttcagccgctttgaggtcaatggtagaataggaaatatcttcttatagaaactagacaaaatgattctcagaaacttctttgtgatgtgtgcgttcaactcacagagtttaacctttcttttcatagagcagttaggaaacactctgtttgtaaactctgcaagtggatattcagacctctttgaggccttcattggaaacgggatttctccatactatgctagacagaagaattctcagtaacttccttgtgttgtgtgtattcaactcacagagttgaacgatcctttacacagagcagacttgaaacactctttttgtggaatttgcaagtggagatttcaaccgctttgaggtcaatggtagaaaaggaaatatcttcgtataaagactagacagaatgattctcataaactcctttgtgatgtgtgcggtcaactcacagagtttaacttttcttttcatagagcagttaggaaacactctgtttgtaaagtgtgcaagtggatattcagacctctttgaggccttcgttggaaacaggatttcttcatattatgctagacagaagaattcccaggaacttccttgtgttgtgtacattcaactcacagagttgaacgttcccttagacagagcagatttgaaacgctctttttgtgcaattggcaagtggtgatttcagcctctttgaggtcaatggtagaaaaggaaatatcttcgtataaaaactagacagaatcattcccacaaactgcgttgtgatgtgttcgttcaactcacagagtttaacctttcttttcatagagcagttaggaaacactctgttggtaaaatctgtaagtggatattctgacatcttgtggccttcgttggaaacgggatttcttcatattctgctagacagaagaattctcagaaacttccttgtgttgtgtgtattcaactcatagagttgaacgatcgtttacacagagcagacttgagaaattctttttgtggaatttgcaagtggagatttcagccgctttgaggtcaatggtagaaaaggaaatatcttcatataaaaactagacagaatgattctcagaaactcctttgtgatgtgtgagttcaactcacagagtttaacctttcttttcatagagcagttaggaaacactctgtttgtaaagtctgcaagtggatattcagacctctttgaggccttcgttggaaacgggatttcttcatattctgctgagacagaagaattctcagtaacttccttgttttgtgtgtattcaactcacagttaaacgatcctttacacagagcagacttgaaacactctttttgtggaatttgcaagtggagatttcagccgctttgaggtcaatagtagaaaaggaaatatcttcgtagaaaaactagacagaatcattctcagaaactgctctgtgatgtgtgcgttcaactctcagagtttaacttttcttttcattcagcagtttggaaacactctgtttgtaaagtctgcatgtggatattttgagcacttggaggccttcgttggaaacgggtttttttcatgtaaggctagacaggagaattcccagtaacttccttgtgttgtgtgcattcaactcacagagttgaacgttccgttagacagagcagatttgaaatactctatttgtgcaatttgcaactgtagatttcaagcgttttaaggtcaatggcagaaaaggaaatatcttcgtataaaaactagtcagaatcattcccacaaactgcgttgtgatgtgttcgttcaactcacagagtttaacctttcttttcatagagcagttaggaaacactctgttggtaaattctgtaagtggatattctgacatcttgtggcctccgttggaaacgggatttcttcatattctgctagacagaataattctcagtaacttccttgtgttgtgtgtattcaactcacagagttgaacgatcctttacagagagcagacttgaaacacgctttttgtggaatttgcaagtggagatttcagccgctttgaggtcaatggtagaataggaaatatcttcctatagaaacaagacagaatgattctcagaaactcctttgtgatgtttgcgttcaactgacagagtttaacctttcttttcatagagcagttaggaaacactctgtttgtaaagtctgcaagtggatattcagacctctttgagtccttcgttggaaacgggatttcttcatattctgctagacagaagaattcccagcaacttccttgtgttgtgtgtgttcaactcacagagttgaactttcatttacacagagcagatttgaaacactctttttgtggaatttgcaagtggagatttcaagcgctttgaggccaaaggcagaaaaggaaatatcttcgtataaaaactagacagaatcattctcagaaactgctgcgtgatgtgtgcgttcaactctcagagtttaacttctcttttcattcagcggtttggaaacactctgtttgtaaagtctgcacgtggatattttgaccacttagaggccttcgttggaaacgggtttttttcatgtaaggctagacagaagaattcccagtaacttccttgtgttgtgtgcattcaactcacagagttgaacgttcccttagacagagcagatttgaaacactctatttgtgcaatttgcaagtgtagatttcaagcgctttaaggtcaatggcagaaaaggaaatatcttcgtttcaaaactagacagaatcattcccacaagctgcgttgtgatgtgttcgttcaactcacagagtttaacctttctgttcatagagcagttaggaaacactctgtttgtaaagtctgtaagtggatattctgacatcttgtggccttcgttgcaaacgggatttcttcatattctgctagacagaagaattctcagtaacttccttgtattgtgagtattcaactcacagagttaaacgatcctttacacagagcagacttgaaacactctttttgtggaatttgcaagtggagaattcagccgctttgaggtcaatggtagaatagtaaatatcttcctatagaaaattgacagaatgattctcagaaactcctttgtgatgtgtgcgttcaactcacagagtttaacctttcttttcatagagcagttaggaaacactctgtttgtaaagtctccaagtggatattcagacctctttgaggccttcgttggatacgtgtttttttcatataaggctagacagaagaattcccagtaacttccttgtgatgtgtgtgttcaactcacagagttgaactttcatttacacagagcagatttgaaacactctttttgtggaatttgcaagtggagatttcaagcgctttgaggccaaaggcagaaaaggaaatatcttcgtttcaaaactagacagaatcattctcagaaactgctctgcgatgtgtgcgttcaactctcagagtttaacttttcttttcattcagcagtttggaaacactgtgtaaagtctgcacgtggataatttgaccacttagaggccttcgttggaaacgggtttttttcatgtaaggctagacagaagaattcccagtaacttccttgtgttgtgtgcattcaactcacagagttgaacgttcccttagacagagcagatttgaaacactctatttgtgcaatttgcaagtgtagatttcaagcggtttaaggtcaacgccagaaaaggaaatatcttcgtttcaaaactagacagaatcattcccacaaactgcgttgtgatgtgttcgttcaactcacagagtttaaactttctgttcatagagcagttaggaaacactctgtttttaaagtctgccagtggatattcagacctctttgaggccttcgttggaaacgggatttcttcatattctgctagacagaagaattctcagaaacttccttgtgttctgtgttttcaactcacagagttgaacgatgctttacacagagtagacttgaaacactcttgtggaatttgcaagtggagatttcatccgctttgaggtcaatggtagaataggaaatatcttcctatagaaactagacagaatgattctcagaaactcctttgagatgtgtgcgttcaactcacagagtttaacctttcttttcatagagcagttaggaaacactctgtttgtaaagtctgcaagtggatattcagacctctttgaggccttcgttggaaacgggatttcttcatattcttctagagagaagaattcccagtaacttccttgtgttgtgtgtgttcaactcacagagttgaactttcatttacacagagcagatttgaaacactctttttgtggaatttgcaagtggagatttcaagcgctttgaggccaaaagcagaaaaggaaatatcttcgtataaaaactagacagaaatcattctcagaaactgctctgcgatgtgtgcgttcaactctcagagtttaacttttcttttcattcagcagtttggaaacactctgtttgtaaagtctgcacgtggatattttgaccacttagaggccttcgttggaaacgggtttttttcctgtaaggctagacagaagaattcccagtaccttccttgtgttgtgtacattccactcacagagttgaacgttcccttagacagagcagatttgaaacactctttttgtgcaattggcaagtggagatttcaagcgctttaaggtcaatggcagaaaaggaaatatcttcgtttcaaaactagacagaatcattcccacaaactgcgttctgatgtgttcgttcaactcacagagtttaacctttctgttcatagagcagttaggaaacactctgtttgtaaagtctgtaagtggatattctgacatcttgtggccttcgttggaaacgggatttcttcatattctgctagacagaagaattctcagtaacttcccttgtgttgtgtgtattcaactcacagagttgtacgatcctttacacagagcagacttgaaacactctttttgtggaatttgcaagtggagatttcagccgctttgaggtcaatggtagaataggaaatatcttcctatagaaacgagacagaatgattctcagaaactcctttgtgatgtgtgcgttcaactcacagagtttaacctttcttttcatagagcagttaggaaacactctgtttgtaaagtctgcaagtggatattcagacatccttgaggctttcgttggaaacgggatttcttcatattctgcaagaaagaagaattctcagtaacttccgcgtgttgtgtgtattcaactcagagagttgaacgatcctttacacagagcagacttgaaacaccctttttgtggaatttgcaagtggagatttcagccgctttgtggtcaatggtacaaaaggaaatatcttcctataaaaactagacagaatcattctcagaaactgctgcgtgatgtgtgcgatcaactctcagagtttaacttttcttttcattcagcggtttggaaacactctgtttgtaaagtctgcacgtggaaattttgacaacttagagaccttcgttggaaacgggattttttcatgtaaggctagacagaagaattcccagtaacttccttgtgttgtgtgcattcaactcacagagttgaacgttcccttagacagagcagatttgaaacactctatttgtgcaatatgcaagtgtagttttcaagctctttaaggtcaacggcagaaaaggaaatatcttggtttcaaaactagacagaatgattctcagaaactcctttgtgatgtgtgcgttcaactcacagagtttaccctttcttttcatagagcagttaggaaacactctgtttgtaaagtctgcaagtggatattcagacatccttgaggcgttcgttggaaacgggatttcttcatattctgccagaaagaagaattctcagtaacttccttgtgttgtgtgtattcaactcacagagttgaacgatccattacacagagcagacttgagacactctttttgtggaatttgcaagtggagatttcagccgctttgaggtcaatggtagaaaaggaaatatcttcgtataaagactagacagaatgattctcagaaaatcttttgtgatgtgtgcgttcaactcacagagtttaacttttcttctcatagagcagttaggaaacactctgtttgtaaagtctgcaagtggatattagacctctttgaggccttcgttggaaacgggatttcttcatattatgctagacagaagaaatcccagtaacttccttgtgttgtgtgttttttaagtcacagagttgaactttcatttacacagagcagatttgaaacactctttttgtggaatttgcaagtggagatttcaagtgctttgaggccaatggcagaaaaggaaatatcttcgtataaaaactagacagaatcattctcagaaactgctctgtgatgtgttcgttcaactctcagagtttaacttttcttttcattcagcagtttggaaacactctgtttgtaaagtctgcacgtggataatttgaccacttagaggccttcattggaaacgggtttttttcatgtaaggctagacagaagaattcccagtaacttctttgtgttgtgtacattcaactcacagagttgaacgttcccttagacagagcagacttgtaacagtctttttgtggaatttgcaagtggagatttcagccgctttgaagtcaaaggtagaaaaggaaatatcttcctataaaaactagacagaatcattcccacaaactgcgttgtgatgtgttcgttcaactcacagagtttaacctttcttttcgtagagcagttaggaaacactctgtttgtaaagtctgcaagtggatattcagacctctttgaggccttcgttggaaacgggatttcttcatattctgctagacagaataattctcagtaacttccttgtgttgtgtgtattcaactcacagagttgaacgatcctttacagagagcagacttgaaacactctttttgtggaatttgcaagtggagatttcagccgctttgaggtcaatagtagaataggaaatatcttcgtagaaaaactagacagaatgtttctcagaaactcctttgagatgtgtgtgttcaactcacagagtttaacctttcttttcatagagcagttaggaatcactctgtttgtaaagtctgcaagtggatattcagacctctttgaggccttcgttggaaacgggtttttttcatataaggctagacagaagaattcccagtaacttccttgtgttgtgtgtgttcaactcacagagctgaactttcatttaaacagagcagatttgaaacactctttttgtggaatttgcaagtggagatttcaagcgctttaaggccaaaggcagaaaaggaaatatcttcgtataaaaactagacagagtgattctcagaaactcctttgtgatgtgtgcgttcaactcacagagtttaacctttcttttcattcagcggtttggaaacactctgtttgtaaagtctgcacgtggatattcagacctctttgaggccttcgttggaaacgggtttttttcatgtaaggctagacagaagaattcccagtaacttccttgtgttgtgtgcattcaactcacagagttgaacgttccttagagagagcagatttgaaacactctatttgtgcaatttgcaagtgtagatttcaagcgctttaaggtcaatggcagaaaaggaaatatcttcgtttcaaaactagacagaatgattctcagaaactcctttgtgatgtgtgcgtttaactcacagagtttaacctttcttttcatagagcagttaggaaacactctgtttgtaaagtctgcaagtggatattcagacctccttgaggccttcgttggaaacgggatttcttcatattatgctagacagaagaattctcagtaacttccttgtgttgtgtgtattcaactcacagcagttgaacgatcctttacacagagcagacttgaaacactctttttgtggaatttgcaagtggagatttcagccgctttgagttcaatggtagaataggaaatatcttcctatagaaactagacagaatgattctcagaaactcctttgtgatgtgtgcgttcaactcacagagtttaacctttcttttcatagagcagttaggaaaaactgtgtttgtaatgtctgcaagtggatattcagacatctttgaggctttcgttggaaacgggatttcttcatattatgctagacagaagaattcccagtaacttccttgtattgtgtgtgttcaactcacagagttgaactttcatttacccagagcagatttgaaacactctttttgtggaatttgcaagtggagatttcaagcgctttgaggccaaaggcagaaaaggaaatatcttcgtttcaaaactagacagaatcattctcagaaactgctctgcgatgtgtgcgttcaactcacagagtttaacctttcttttcatagagcagttaggaaacactctgtttgtaaagtctgcaagtggatattcagacctctttgaggccttcgttggaaacgggatttcttcatataaggctagacagaagaattctcagtaacttccttgtgttgtgtacattcaactcacagagttgaacgttcccttagacagagcagacttgtaacactctttttgtggaatttgcaagtggagatttcagccgctttcaagtcaaaggtagaaaaggaaatatcttcctataaaaactagacagaatcattcccacaaactgcgttgtgatgtgttcgttcaactcacagagtttaacctttcttttcatagagcagttaggaaacactctgttggtaaattctgtaagtggatattctgacatcttgtggccttcgttggaaacgggatttcttcatattctgctagacagaagaattctcagtaacttccttgtgttgtgtgtattcaactcacagagttgaacgatcctttacacagagcagacttgaaacactctttttgtagaatttgcaagtggagatttcagccgctttgaggtcaatggtagaaaaggaaactatcttcatataaagactagacagaatgattctcagaaactcatttgtgatgtgtgcgttcaactcacagagtttaacctttcttttcatagagcagttaggaaacactctgtttttaaagtctgcaagtggatattcagacctttttgaggccttcgttggaaacgggatttcttcatatgatgctagacagaagaattcccagtaacttccttgtgttgtgtgtattcaactcacagagttgaactttcatttacacagagcagatttgaaacactctttttgtggaattttcaaatggagatttcaagcgctttgaggccaaaggcagaaaaggaaatatcttcgtataaaaactagacagaatcattctcagaaactgctctgcgatgtgtgcgttcaactctcagagtttaacttttcttttcattcagcagtttggaaacactctgtttgtaaagtctgcacgtggatattttgaccacttagaggccttcgttggaaacgggtttttttcatggaaggctagacagaagaattctcagtaacttccttgtgttgtgtgtattcaactcacagagttgaacgatcctttacacagagcagacttgtaacactctttttgtggaatttgcaagtggagatttcagccgctttgaagtcaaatgtagaaaaggaaatatcttcctttaaaaactagacagaatcattcccacaaagtgcgttgtgatgtgttcgttcaactcacagagtttaacctttctgttcatagagcagttaggaaacactctgtgtgtaaagtctgcaagtggatattcagacctctttgaggccttcgttggaaacgggatttcttcatattctgctagacagaagaattctcagaaacttccttgtgttgtgtgttttcaactcacagagttcaacgatcctttacacagagcagacttgaaacactctttttgtggaatttgcaagtggagatttcagccgctttgaggtcaatggtagaataggaaatatcttcctatagaacctagacagaatgattctcagaaaatcttttgtgatgtgtgcgttcaactcacagagtttaacttttcttctcatagagcagttaggaaacactctgtttgtaaagtctgcaagtggatattcagacctctttgaggccttcgttggaaacgggatttcttcatattttgctagacagaagaattcccagtaacttccttgtgttgtgtgtgttcaactcacagagttgaactttcatttacacagagcagatttgaaacactctttttgtggaatttgcaagtggagatttcaagcgctgtgaagccaaaggcagaaaaggaaatatcttcgtataaaaactagacagaaatcattctcagaaactgctctgcgatgtgtgcgttcaactctcagagtttaacttttcttttcattcagcagtttggaaacactctgtttgtaaagtctgcacgtggatattttgaccacttagagtccttcgttggaaacgggtttttttcatgtaaggctagacagaagaattcccagtaacttcccttgtgttgtgtacattcaactcacagagttgaacgttcccttagacagagcagatttgaaacactctttttgtgcaattggcaagtggagatttcaagcgctttaaggtcaatggcagaaaaggaaatatcttcgtttcaaaactagagagaatgattctcagaaactcctttgtgatgtgtgcgttcaacacacagagtttaacttttcttttcatagagcagttaggaaacactctgtttgtaaagtctgcaagtggatattcagacctccttgacgccttcgttggaaacgggatttcttcatattctgctagacagaagaattctcagtaacttccttgtgttgtgtgtattcaactcacagacttgaacgatcctttacacagagcagacttgaaacactctttttgtggaatttgcaagtggagatttcagccgctttgaggtcaatagtagaaaaggaaatatcttcgtagaaaaactagacagaatgattctcagaaactcctttgtgatgtgtgcgttcaactcacagagtttaaactttcttttcatagagcagttaggaaacactctgtttgtaaagtctgcaagtggatattcagacctccttgaggccttcgttggaaacgggatttcttcatattatgctagacagaagaattctcagtaacttccttgtgttctgtgtattcaactgacagagttgaactttcatttagagagagcagatttgaaacactgtttttgtggaatttgcaagtggagatttcaagcgctttggggccaaaggcagaaaaggaaatatcttcgtataaaaactagacagaatcattctcagaaactgctctgcgatgtgtgcgttcaactctcagagtttaacttttcttttcattcagcagtttggaaacactctgtttgtaaagtctgcacgtggatattttgatcacttagaggccttcgttggaaacgggtttttttcctgtaaggctagacagaagaattaccagtaacttccttgtgttgtgtacattcaactcacagagttgaacgttcccttagacagagcagatttgaaacactctttttgtgcaattggcaagtggtgatttcagccgctttgaggtcaatggtagaaaaggaaatatcttcgtataaaaactagacagaatcattcccacaaactgcgttgtgatgtgttcgttcaactcacagagtttaacctttctgttcatagagcagttaggaaacactgtgtaaagtctgttagtggatattctgacatcttgtggccttcgttggaaacgggatttcttcatattctgctagacagaagaattctcagtaacttccttgtgttgtgtgtattcaactcacagagttgaacgatcctttacacagagcagacttgaaacactctttttgtggaatttgcaagtggagatttcagccactttgaggtcaatggtagaaaaggaaatatcttcgtataaagactagacagaatgattctcagaaactcctttgtgatgtgtacgttcaactcacagagtttaacctttcttttcatagagcagtgaggaaacactctgtttgtaaagtctgcaagtggatattgagacctctttgaggccttcgttggaaacgggtttttttcatataaggctagacagaagaattcccagtaacttccttgtgttgtgtgtgttcaactcacaggagttgaactttcatttacccagagcagatttgaaacactctttttgtggaatttgcaagtggagatttcaagcgctttgaggccaaaggcagaaaaggaaatatcttcgtttcaaaactagacagaatcattctcagaaactgctgcgtgatgtgtgcgttcaactctcagactttaacttttcttttcattcagcggtttggaaacactctgtttgtaaagtctgcatgtggatattttgaccacttagaggccttcgttggaaacgggtttttttcatgtaaggcaagacagaagaattcccagtaacttccttgtgttgtgtacattcaactcacagagttgaacgtttccttagacacagcagatttgaaacactgtttttgtgcaattggcaagtggtgatttcagccgctttgaggtcaatggtataaaaggaaatatcttcatataaaaactagacagaatgattctcagaaactcctttgtgatgtgtgcgttcaactcacagagtttaacctttcttttcatagagcagttaggaaacactctgtttataaagtctgcaagtggatattcagacccctttgaggccttcgttggaaacgggatttcttcatattatgctagacagaagaattctcaataacttccttgtgttgtgtgtattcaactcacagagttcaacgatcctttacacagagcagacttgaaacactcttgttgtggaatttgcaagtggagatttcagccgctttgaggtcaatggtagaataggaaatatcttcctataaaaactagacagaatgattctcagaaactgctttgtgatgtgtgtgttcaactcacagagtttaacgtttcttttcatagagcagttagtaaacactctgtttataaagtctgcaagtggatattcagacccctttgaggccttcgttggaaacgggatttcttcatattatgctagacagaagaattctcagtaacttccttgtgttgtgtgtattcaactgacagagttaaactttcatttagagagagcagatttgaaacactgtttttgtggaatttgcaagtggagatttcaagcgctttggggccaaaggcagaaaaggaaatatcttcgtataaaaactagacagaatcattctcagaaactgctctgcgatgtgtgcgttcaactctcagagtttaacttttcttttcattcagcagtttggaaacagtctgtttgtaaagtctgcacgtggatattttgaccacttagaggccttcgttggaaacgggtttctttcatgtaaggctagacagaagaattcccagtaacttccttgtgttgtgtgcattcaactcacagagatgaacgttcccttagacagagcagatttgaaacactctatttgtgcaatttgcaagtgtagatttcaagcgctttaaggtcaatggctgaaaaggaaatatcttcgtttcaaaactagacagaatcattcccacagactgcgttgtgatgtgttcgttcaactcacagagtttaacctttcttttcatagagcagttaggaaacactctgttggtaaattctgtaagtggatattctgacatcttgtggcctccgttggaaacgggatctcttcatattctgctagacagaagaattctcagtaacttccttgtgttgtgtgtattcaactcacagagttgaacgatcctttacacagagcggacttgaaacactcgttttgtggaatttgcaagtggagattccagccgcgttgaggtcaatggtagaaaaggaaatatcttcgtataaaaactagacagaatgattctcagaaactcctttgtgatgtgtgggttcaactcacagagtttaacctttcttttcatagagcagttaggaaacactctgtttgtaaagtctgcatgtggatatttggacttctttgaggccttcgttggaaacgggtttttttcatgtaaggctagacagaagaattctcagtaacttccttgtgttgtgtgtattcaactgacagagttcaactttcatttagagagagcagatttgaaacactgtttttgtggaatttgcaagtggagatttcaagcgctttggggccaaaggcagaaaaggaaatatcttcgtataaaaactagacagaatcattctcagaaactgctctgcgatgtgtgcgttcaactctcagagtttaacttttcttttcattcagcagtttggaaacactctgtttgtaaagtctgcacgtggataacttgaccacttagaggccttcgttggaaacgggtttttttcctgtaaggctagacagaagaattcccagtaacttccttgtgttgtgtacattgaactcacagagttgaacgttcccttagacagagcagatttgaaacactctttttgtgcaattggcaagtggagatttcaagcgctttaaggtcaatggcagaaaacgaaatatcttcgtttcaaaactagacagaatcattcccacaaactgcgttgtgatgtgttcgttccactcacagagtttaacctttctgttcatagagcagttaggaaacactctgtttgtaaagtctgtaagtggatattctgacatcttgtggccttcgttggaaacgggatttcttcatattctgctagacagaagaattctcagtaacttccttgtgttgtgtttattcaactcacagagttgaacgatcctttacacagagcagacttgaaacactctttttgtggaatttgcaagtggagatttcagccgctttgaggtcaatggtagaaaaggaaatatcttcgtagaaaaactagacagaatgattctcagaaactcctttgtgatgtgtgcgttcaactcacagagtttaacctttcttttcatagagaagttaggaaacactctgtttgtaaagtctgcaagtggatattcagacctctttgaggccttcgttggaaacgggatttcttcatattctgctagagagaagaattctcagtaacttccttgtgttgtgtgtattcaactgacagagttgaactttcatttagagagagcagatttgaaacactgtttttgtggaatttgcaagtggaaatttcaagcgctttggggtcaaaggcagaaaaggaaatatcttcgtataaaaactagacagaatcattctcagaaactggtgcgtgatgtgtgcgttcaactctcagagtttaacttttcttttcattcagcggtttggaaacactctgtttgtaaagtctgcacgtggaaattttgaccacttagaggccttcgttggaaacgggtttttttcatgtaaggctagacagaagaattctcagtaacttccttgtgttgtgtgtattcaactcacagagttgaacgatcctttacacagagcagacttggaacactctttttgtggaatttgcaagtggagatttcagccgctttgaagtcaaatgtagaaaaggaaatatcttcctataaaaactagacagaatcattcccacaaactgcgttgtgatgtgtgcgttcaactcaaagagtttaacctttcttttcatagagcagttaggaaacactctgtttgtaaattctgcaagtggatattcagacctccttgaggccttcgttggaaacgggatttcttcatattctgctagacagagaattctcagtaacttccttgtgttgtgtgtattcaactcacagagttgaacgatcctttacacagagcagacttgaaacactctttttgtggaatttgcaagtggagatttcagccgctttgaggtcaatggtagaaaaggaaatatcttcgtataaagactagacagaatgattctcagaaactcctttgtgatgtttgcgttcaactcacagagtttaacttttcttttcatagagcagttaggaaacactctgtttgtaaagtctgcaagtggatattcagacctctttgaggccttcgttggaaacgggatttcttcatattatgctagacagaagaattctcagtcacttccttgtgttgtgtgtattcaactgacagagttgaactttcatttagagagagcagatttgaaacactgtttttgtggaatttgcaagtggagatttcaagcgctttggggccaaaggcagaaaaggatatatcttcgtataaaaactagacagaatgattctcagaaactcctttgtgatgtgtgcgttcaactcacagagtttaacctttcttttcatagagcagttaggaaacactctgtaaagtctgcaagtggatattcagacctccttgaggccttctttggaaaccggatttcttcatattctgctatacagaagaattctcagaaacttccttgtgttgtgtgttttcaactcacagagttcaacgatcctttacacagagcagacttgaaacactctttttgtggaatttgcaagtggagaattcagccgctttgaggtcaatggtagaataggaaatatcttcctatagaaactagacagaatgattctcagaaactcctttgtgatgtgtgcgttcaactcacagagtttaacctttcttttcatagagcagttaggaaacactctgtttgttaagtctgcaagtggatattcagacctccttgaggccttcgttggaaacgggatttcttcatattatgctagacagaagaattctcagtaagttccttgtgttgtgtgtattcaactcacagagttgaatgatcctttacacagagcagacttgaaacactctttttgtggaatttgcaagtggagatttcatccgatttgaggtcaatggtagaataggaaatatcttcctatagaaactagacagaatgattctcagaaactcctttgtgatgtgtgtgttcaactcacagagtttaacctttcttttcatagaggagttaggaaacactctgtttgtaaagtctgcaagtggatattcagacctctttgaggccttcgttggaaacgggtttttttcatgtaaggctagacagaagaattcccagtaacttccttgtgttgtgtgtattcaactcacagagttgaactttcatttacacagagcagatttgaaacactctttttgtggaatttgcaaatggagatttcaagccctttcaggccaaaggtagaaaaggaaatatcttcgtataaaaactagacagaatcattctcagaaactgctgcgtgatgtgtgcgttcaactctcagactttaacttttcttttcattcagccgtttggaaacactctgtttgtaaagtctgcacgtggatattttgaccacttagaggccttcgttggaaacgggtttttttcatgtaaggctagacagaagaattcccagtaacttccttgtgttgtgtgcattcaactcacagagttgaacgttcccttagacagagcagatttgaaacactctatttgtgcaatttgcaagtgtagatttcaagcgctttaaggtcaatggcagaaaaggaaatatcttcgtttcaaaactagacagaaatcattcccacaaactgcgttgtgatgtgttcgttcaactcacagagtttaacctttctgttcatagagcagttaggaaacactctgtttgtaaagtctgtaagtggatattctgacatcttgtggccttcgttggaaacgggatttcttcatattctgctagacagaagaattctcagtaacttccttgtgttgtgtttattcaactcacagagttgaatgatcctttacacagagcagacttgaaacactctttttgtggaatttgcaagtggagatttcagccgctttgaggtcaatggtagaaaagtaaatatcttcctataaagactagacagaatgattctcagaaactcctttgtgatgtgtgcgttgaactcacagagtttaacctttcttttcatagagcagttaggaaacactctgtttgtaaagtctgcaagtggatattcagacatctttgaggctttcgttggaaacgggagttcatcatattctgctagacagaagaattctcagtaactgccttgtgttgtgtgtattcaactcacagagttgaacgatcctttacacagagcagacttgaaacactctttttgtggaatatgcaagtggagatttcagccgctttgaggtcaatggtagaataggaaatatcttcctatagaaactagacagaatcattctcagaaactgctgcgtgatgtgtgcgttcaactctcagagtttaacttttcttttcattcagcggtttggaaacactctgtttgtaaagtctgcacgtggaaattttgaccacttagaggccttcgttggaaacgggattttttcatgtaaggctatacagaagaattcccagtaacttccttgtgttgtgtgcattcaactcacagagttgaacgttcccttagacagagcagatttgaaacactatatttgtgtaatttgcaagtgtagatttcaagcgctttaaggtcaacggcagaaaaggaaatatcttcgtttcaaaactagacagaatcattcccacaaactgcgttgtgatgtgttcgttcaactcacagagtttaacctttcttttcatagagcagttaggaaacagtctgtttgtcaattctgtaactggatattctgacatcttgtggccttcgttggaaacgggatttcttcatattctgctagacagaagaattctcagaaacttccttgtgttgtgtgtattcaactcacagagttgaacgatcctttactctgagcaggcttgaaacactccttttgtggaacttgcaattggagatttcagccgctttgaggtcaatggtagaataggaaatatcttcctatagaaactagatagaatgattctcagaaactcctttgtgatgtgtgtgttcaactcacagagtttaacctttcttttcatagagcagttaggaaacactctgtttgtaaagtctgcaagtggatattcagacccctttgaggccttcgttggaaacgggatttcttcatattctgctagacagaagaattctcagtaacttccttgtgttgtgtgtattcaactgacagagttgaactttcatttagagagagcagatttgtaacactgtttttgtggaatttgcaagtggagatttcaagcgctttggggccaaaggcagaaaaggaaatatcttcgtataaaaactagacagaatcattctcagaaactgctgcgtgatgtgtgcgttcaactctcagagtttaacttttcttttcattcagcggtttcgaaacactctgtttgtaaagtctgcacgtggatattttgaccacttagaggccttcgttggaaacgagtttttttcatgtaaggctagacagaagaattcccagtaacttccttgtgttgtgtgcattcaactcacaggagttgaacgttcccttagacagagcagatttgaaacactctatttgtgcaatttgcaagtgtagatttcaagcgctttaaggtcaatggcagaaaaggaaataccttcgtttcaaaactagacagaatcattcccacaaactgcgttgtgatgtgttcgttcaactcacagagtttaacttttcttttcatagagcagttaggaaacactctgtttgtaaagtctgcaagtggatattcagacctccttgaggccttcgttggaaacgggatttcttcatattctgctagacagaagaattctcagtaacttccttgtgttgtgtgcattcaactcacagatttgaacgatcctttacacagagcagacttaaaacacactttttgtggaatttgcaagtggagatttcagccgctttgaggtcaatagtagaaaaggaaatatcttcgtagaaaaactagacagaatgattctcagaaactcctttgtgatgtgtgtgttcaacctcacagagtttaacctttcttttcatagagcagttagtaaacactctgtttataaagtctgcaagtggatattcagacccctttgaggccttcgttggaaacgggatttcttcatattatgctagacagaagaattctcagtaacttccttgtgttgtgtgtattcaacggacagagttgaactttcatttagagagagcagatttgaaacactgtttttgtggaatttgcaagtggagatttcaagcactttggggccaaaggcagaaaaggaaatatcttcgtataaaaactagacagaatcattctcagaaactgctgcgtggtgtgtgcgttcaaatctcagagtttaacttttcttttcattcagcggtttggaaacactctgtttgtaaagtctacacgtggatattttgaccacttagaggccttcgttggaaactggttttcttcatgtaaggctagacagaagaattcccagtaacttccttgtgttgtgtacattcaactcacagagttgaacgttcccttagacagagcagatttgaaacacactttttgtgcaattggcaagtggtgatttcagccgctttgaggtcaatggtagaaaaggaaatatcttcgtataaaaactagacagaatcattcccacaaactgcgttgtgatgtgctcgttcaactcacagagtttaacctttctgttcatagagcagttaggaaacactctgtttgtaaagtctgaaagtggataatctgacatcttgtggccttcgttggaaacgggatttcttcatattctgctagacagaagaattctcagtaacttccttgtgttgtgtgtattcaactcacagagttgaaggatcctttacagagagcaggcttgaaacactctttttgtcgaatttgaaagtggagatttcagccgctttgaggtcaatggtagaataggaaatatcttctaatagaaactagacagaatgattctcagaaactcctttgtgatgtgtgcgttcaactcacagagtttaacctttcttttcatggagcagttaggaaacactctgtttgtaaagtctgcaagtggatattcagacctcctagaggccttctttggaaacaggctttcttcatattatgctagacagaagaattcccagtaacttccttgtgttgtgtgtgttcaactcacagagttgaactttcttttacacagagcagatttgaaacactctttttgtggaatttgcaaatggagatttcaagcgctttgaggccaaaggcagaaaaggaaatatcttcgtataaaaactagacagaatcattctcagaaactgctctgcgatgtgtgcgttcaactctcagagtttaacttttcttttcattcagcagtttggaaacactctgtttgtaaagtctgcacgtggatactttgaccacttagagaccttcgttggaaacgggtttttttcctgtaaggctagacagaagaattcccagtaacttccttgtgttgtgtacattcaactcacagagttgaacgttcccttagacagagcagatttgaaacactctttttgtgcaattggcaaatggagatttcaagcgctttaagttcaatggcagaaaaggaaatatcttcgtttcaaaactagacagaatcatttccacatactgcgatgtgatgtgttcgttcaactcacagaatttaacctttctgttcctagagcagttaggaaacactctgtttgtaaagactgtaagtggatattatgacatcatgtggccttcgttggaaacgggatttcttcatattctgctggacagaagaattctcagtaacttccttgtgttgtgtgtatttaactcacagagttgaatgatcctttacacagagcagacttgaaacactctttttgtggaaattgcaagtggagatttcagccgctttgaggtcaatggtagaaaagtaaatatcttcgtataaagactagacagaatgattctcagaaactcctttgtgatgtgtgcgttcaactcacagagtttaacctttcttttcatagagcagttaggaaacactctgtttgtaaagtctgcaagtggatattcagacctctttgaggccttcgttggaaacgggtttttttcatataaggctacacagaagaattctcagtaacttccttgtgttgtgtgtattcaactgacagagttgaactatcatttagagagagcagatttgaaacactgtttttgtggaatttgcaagtggagatttcaagcgctttggggccaaaggcagaaaaggaaatatcttcgtataaaaactacacagaatcattctcagaaactgctgcgtgatgtgtgcgttcaactctcagagtttaacttttcttttcattcagcggtttggaaacactctgtttgtaaagtctgcacgtggatattttgaccacttagaggccttcgttggaaacggctttttttcatgtaaggctagacagaagaattcccagtaacttccttgtgttgtgtgcattcaactcacagagttgaacgttcccttagacagagcagatttgaaacactctatttgtgcaatttgcaagtgtagttttcaagctctttaaggtcaacggcagaaaaggaaatatcttcgtttcaaaactagacagaatgattctcagaaactcctttgtgatgtgtgcgttcaactcacagagtttaacctttcttttcatagagcagttaggaaacactctgtttgtaaagtctgcatgtggatattcagacctctttgaggccttcgttggaaacggggtttcttcatattatgctagacagaagaattctcagtaacttccttgtgttgtgtgtattcaactcacagagttgaacgatcctttacacagagcagactggaaacactctttttgtggaaattgcaagtggagatttcagccgctttgaggtcaatggtagaaaaggaaatatcttcgtataaaaactagacagaatgattctcagaaactcctttgtgatgtgtgcgttcaaatcacagagtttaacttttcttttcatatagcagttaggaaacactctgtttgtaaagtctgcaagtggatattcagacctctttgaggccttcgttggaaacgggatttcttcatattatgctagacagaagaattgtcagtaacttccttgtgttgtgtgtattcaactgacagagttgaactttcatttcgagagagcagatttgaaacactgtttttgtggaatttgcaagtggagatttcaagcgctttggggccaaaggcagaaaaggaaatatcttcgtataaaaactagacagaatcattctcagaaactgctgtgtgatgtgtgcgttcaactctcagagtttaacttttcttttcattcagcggtttggaaacactctgtttgtaaagtctgcacgtggatattttgaccacttagaggccttcgttggaaacgggtttttttcatgtaaggctagacagaagaattcccagtaacttccttgtgttgtgtgcattcaactcacagagttgaacgttcccttagacagagcagatttgaaacactctatttgtgcaatttgcaagtgtagatttcaagcgctttaaggtcaatggcagaaaaggaaatatcttcgttttaaaactagacagaatcattcccacaaactgcgttgtgatgtgttcgttcaactcacagagtttaacctttcttttcatagagcagttaggaaacagtctgtttgtaaattctgtaagtggatattctgacatcttgtgaccttcgttggaaacgggatttcttcatattctgctagacagaagagttctcagtaacttccttctgttgtgtgtattcaactcacagagttgaacgatcctttacacagagcagacttgaaacactctttttgtggaatttgcaagtggagatttcagccgcttttaggtcaatagtagaaaaggaaatatcttcgtagaaaaactagacagaatgattctcagaaactcctttgtgatgtgtgcgttcaactcacagagttcaacctttcttttcatagagcagttgggaaacactctgtttgtaaagtctgcaagtggatattcagacttctttgaggccttctttggaagcgggatttcttcatattctgctagacagaagaattctcagtaacttccttgtgttgtgtgtattcaactcacagagttgaactttcatttagagagagcagatttgaagcactgtttttgtggaatttgcaagtggagacttcaagcgctttggggccaaaggcagaaaaggaaataccttcgtataaaaactagacagaatcattctcagaaactgctgcgtgatgtgtgcgttcaactctcagagtttaagttttcttttcattcagcggtttggaaacactctgtttgtaaagtctgcacgtggatattttgaccacttagaggccttcgttggaaacgggttttttcatgtaaggctagacagaagaattcccagtaacttccttgtgttgtgtgcattcaactcacagagtggaacgttcccttagacagagcagatttgaaacactctatttgtgcaatttgcaagtgtagatttcaagcgctttaaggtcaacggcagaaaaggaaatatcttcttttcaaaactagacagaatcattcccacaaactgcgttgtgacgtgttcgttcaactcacagagtttaacctttctgttcatagaggagttaggaaacactctgtttgtaaagtctgtaagtggatattctgacatcttgtggccttcgttggaaacgggatttctttatattctgctagacagaagaattctcagtaacttccttgtgttgtgtgtattcaactcacagagttgaacgatcctttacacagagcagacttgtaacactctttttgtggaatttgcatgtggagatttcagccactttgaagtcaaaggtagaaaaggaaataacttcctataaaaactagacagaatgattctcagaaactcctttgtgatgtgtgcattcaactcacagagtttaacttttcttttcatagagcagttgggaaacactctgtttgtaaagtctgcaactggatattcagacctctttgaggccttcgttggaaacgggatttcttcatattctgctagacagaagaattcccagtaacttcattgtgttgtgtgtgttcaactcacagagttgaacttccatttacacagagcagatttgaaacactctttttgtggaatttgcaagtggagatttcaagcgatttgaggccaaaggcagaaaaggaaatatacttcgtttcaaaactagacagaatcattctcagaaactgctctgcgatgtgtgcacgttcaactctcagagtttaacttttcttttcattcagcagtttggaaacactctgtttgtaaagtctgcacgtggatattttgaccacttagaggccttcgttggaaatgggttttttttcctgtaaggctagacagaagaattcccagtaacttccttgtgttgtgtgcattcaactcacagcagttgaacgttcccttagacagagcagatttgaaacactctatttgtgcaatttgcaagtgtagatttcaagcgctttaaggtcaacggcagaaaaggaaatatcttcgtttcaaaactagacagaatcattcccacaaactgcgttgtgatgtgtgcgttcaactcaaagagtttaacctttcttttcatagagcagttaggaaacactctgtttgtaaagtctgcaagtggatattcagacctccttgaggccttcgttggaaacgggatttcttcatattctgctagacaggaataattctcagtaacttccttgtgttgtgtgtattcaactcacagagttgaaagatcctttacagagagcaggcttgaaacactctttttgtcgaatttgcaagtggagatttcagccgctttgaggtcaatggtagaataggaaatatcttcttatagaaactagacagaatgattctcagaaaatcctttgtgatgtgtgcgttcaactcacagagtttaacctttcttttcatagagcagttaggaaacactctgtttgtaaagtctgcaagtagatattcagacattctttgaggccttcgttggaaacgggatttcttcatgttctgctagaaagaagaattctcagtaacttccttgtgttgtgtgtattcaactcacagagttgaacgatcctttacacagagcagacttgaaacactctttttgtggaatttgcaagtggagatttcaaccgctttgaggtcaatggtagaaaagtaaatatcttcgtataaaaactagacagagaatcattctcagtaaactgctgcgtgatgtgtgcgttcaactctcagagtttaacttttcttttcattcagcggtttggaaacactctgtttgtaaagtctgcacgtggatattttgaccacttagaggccttcgttggaaacgggtttttttcatgtaaggctagacagaagaattcccagtaacttccttgtgttgtgtgctttcaactcacagagttgaacgttcccttagacagagcagatttgaaacactctatttgtgcaatttgcaagtgtagatttcaagcgctttaaggtcaatggcagaaaaggaaatatcttcgtttcaaaactagaaagaatcattcccacaaactgcgttgtgatgtgttcgttcaactcacagagtttaacctttctgttcatagagcagttaggaaacactctgtaaagtctgtaagtggatattctgacatcttgtggccttcgttggaaacgggatttcttcatattctgctagacagaataattctcaataacttccttgtgttgtgtgtattcaactcacagagttgaaggatcctttacagagagcaggcttgaaacactctttttgtcgaatttgcaagtggagatttcagccgctttgaggtcaatggtagaataggaaatgtcttcttatagaaactagacaaaatgattctcagaaactcctttgtgatgtgggcgttcaactcacagagtttaacctttcttttcatagagcagttaggaaacactctgtttgtaagtctgcacgtggatatttggacttctttgaggccttcgttggaaacgggtttttttcatgtaaggctagacagaagaattcccagtaacttccttgtgttgtgtgtgttctactcacagagttgaactttgatttacacagagcagatttgaaacactctttttgtggaatttgcaagtggagatttcaagcgctttgaggccaaaggcagaaaaagaaatatcttcgtataaaaactagacagaatcattctcagaaactgctctgcgatgtgtgcgttcaactctcagagtttaacttttcttttcattcagcagtttggaaaaactctgtttgtaaagtctgcacgtggatattttgaccacttagaggccttcgttggaaacgggtttctttcctgtaaggctacacagaagaattcccagtaacttcttgtgttgtgtgcattcaactcacagagttgaacgttcccttagacagagcagatttgaaacactctatttgtgcaatttgcaagtgtagatttcaagcgctttaaggtcaacggcagaaaaggaaatatcttcgtttcaaaactagacagaatcattcccacaaactgcgttgtgatgggttcgttcaactcacagagtttaacctttctgttcatagagcagttaggaaacactctgtttgtaaagtctgtaagtggatattctgacatcttgtggccttcgttggaaacgggatttcttcatattctgctagacagaacaattctcagtaacttccttgtgttgtgtgtattcaactcacagagttgaacgatcctttacacagagcagacttgaaacactctttttgtggaatttgcaagtggagatttcagccgctttgagttcaatggtagaataggaaatatcttcctatagaaactagacagaatgattctcagaaactcctttgtgatgtgtgccttcaactcacagagtttaacctttcttttcatagagcagttaggaaacactctgtttgtaaagtctgcaagtggatattcagacctctttgagaccttcgttggaaacgggatttcttcatattctgctagacagaatcattctcagaaactgctctgcgatgtgtgcgttcaactctcagagtttaacttttcttttcattcagcagtttggaaacactctgtttgtaaagtctgcacgtggatattttgaccacttagaggccttcgttggaaacgggtttttttcctttaaggctagagagaaaaattcccagtaacttccttgtgttgtgtgtattcaactcacagagttgaacgttccctttgacagagcagatttgaaacactctttttctgcaatttggaagtgtagatttgaagcgctttaaggtcaatggcagaaaaggaaatatcttcgtttcaaaactagacagaacgattctcagaaactcctttgtgatgtgtgcgttcaactcacagagtttaacctttcttttcatagagcagttaggaaacactctgtttgtaaagtctgtaagtggatattcagacctgctttgaggccttcgttggaaacgggatttcttcatattatgctagacagaagaattctcagcaacttccttgtgttgtgtgtattcaactcaaggagttgaacgatcctttacacagagcagacttgaaacactctttttgtggaatttgtaagtggagatttcagccgctttgaggttaatggtagaaaatgaaatatattcgtatagaaactagacagaatgattctcagaaactcctttgtgatgtgtgcgttcaactcacagagtttaacctttcttttcatagagcagttaggaaacactctgtttgtaatgtctgcaagtggatattcagacatctttgaggctttcgttggaaacgggatttcttcatattctgctatacagaagaattcccagtaacttccttgtgttgtgtgtgttcaactcaccgagttgaactttcatttacacagagcagatttgaaacactctttttgtggtatttgcaagtggagatttcaagcgctttgaggccaaaggcagaaaaggaaatatcttcgtttcaaaactagacagaatcattctcagaaactgctctgcgatgtgtgcgttcaactctcagagtttaacttttcttttcattcagcagtttggaaacactctgtttgtaaagtctgcacgtggatattttgaccacttagaggccttcgttggaaaagggcttttccctgtaaggctagacagaagaattcccagtaacttccttgtgttgtgtgcattcaactcacagagttgaacgttcccttagacagagcaggtttgaaacactctatttgtgcaatttgcaagtgtagatttcaagcgcattaaggtcaatggcagaaaaggaaatatcttcgtttcaaaactagacagaatcattcccacaaacagcgttgtgatgtgttcgttcaactcacagagtttaacctttcttttcatagagcagttaggaaacagtctgtttgtcaattctgtaagtggatattctgacatcttgtggccttcgttggaaacgggatttcttcatattctgctagacagaagaaatctcagtaacttccttgtgttgtgtgtattcaactcacacagttgaacgatccttttcagagagcagacttgaaacactctttttgtggaatttgcaagtggagatttcagccgctttgaggtcaatggtagaaaaggaaatatcttcgtataaagactagacagaatgattctcagaaactcctttgtgatgtgtgtgttcaactcacagagtttaacctttcttttcatacagcagttaggaaacactctgtttgtaaattctgcaagtggatattttgaccgctttgaggccttcgttggaaacaagtttttttcatgtaaggctagacagaagaattctcagtaactgccttgtgttgtgtgtattcaactcacagagttgaacgatcctttacacagagcagacttgaaacactctttttgtggaatttgcaagtggagatttcagccgctttgaggtcaatggtagaataggaaatatcttcctatagaaactagagagaatcattctcagaaactgctctgcgatgtgtgcgttcaactctcagagttttacttttcttttcattcagcagtttggaaacactctgtttgtaaagtctgcacgtggatattttgaccatttagaggccttcgttggaaacgggtttttttcctgtaaggctagacagaagaattctcagtaacttccttgtgttgtgtgtattcaactcacacagttgaacgatcctttacacagagcagacttgtaacactctttttgtggaatttgcaagtggagatttcagccgctttgaagtcaaatgtagaaaaggaaatatcttcctataaaaactagacatagtgattctcagaaactcctttgtgatgtctgcgttcaactcacagagtttaacctttcttttcatagagcagttaggaaacactctgtttgtaaagtctgcaagtggatatagagacctcctttaggccttcgttggaaatgggatttcttcatattctgctatacagaagaattctcagaaacttcccttgtgttgtgtgtattcaactcacagagttgaacgatcgtttacacagagcagacttgagacactctttttgtggaatttgtaagtggagatttcagccgctttgaggtcaatggtagaaaaggaaatatcttcatataaaaactagacagaatgattctcagaaacttctttgtgatgtgtgcgttcaactcacagagtttaacctttcttttcatagagcagttaggaaacactctgtttgtaaactctgcaagtcgatattcagacctctttgaggccttcgttggaaacgggatttcttcatactatgctagacagaagaattcccagtaacttccttttgttgtgtgtgttcaactcacagagttgaactttcatttacacagagcagatttgaaacactctttttgtgaaatttgcaagtggagatttcaagcgctttgaggccaaaggcagaaaaggaaatatcttcgtttcaaaactagacagaatcattctcagaaactgctgcgtgatgtgtgcgttcaactctcagagtttaacttttcttttcattcagcggtttggaaacactctgtttgtaaagtctgcacgtggaaattttgaccacttagaggccttcattggaaacgggtttttttcatgtaaggctagacagaagaattcccagtaacttccttgtgttgtgtgcattcaactcacagagttgaacgttcccttagacagagcagatttgaaacaatctatttgtgcaatttgcaagtgtagatttcaagcgctttaaggtcaatggcagaaaaggaaatatcttcgtttcaaaactagacagaatgattcccacaaactgcgttgtgatgtgttcgttcaactcacagagtttaacctttctgttcatagagcagttaggaaacactctgtttgtaaagtctgtaagtggatattctgacatcttgtggccttcgttggaaacgggatttcttcatattatgctagacagaagaattctcagtaacttccgcgtgttgtgtgtattcaactcacagagttgaacgatcctttacacagagcagacttgaaacactctttttgtggaatttgccagtggagatttcagccgctttgaggtcaatggtagaaaaggaaatatcttcctgtaaaaactagacagaatgattctcagaaactccttcgtgatgtgtgcgttgaactcacagagtttaacctttcttttcatagagcagttaggaaacactctgtttgtaaagtctgcaagtggatattcagacctctttgaggcgttcgttggaaacgggtttttttcatataaggctagagagaagaattctcagtaacttccatgtgttgtgagtattcaactcacagagttgaacgatcctttacacagagcagacttgtaacaatcattttgtggaatttgcaattggagatttcagccgctttgaagtcaaaggtagaaaaggaaatatcttcgtataaaaactagacagaatcattctcagaaactgctgcgtgatgtgtgcgttcaacttctcagagtttaactttgcttttcattcagcggtttggaaacactctgtttgtaaagtctgcacgtggatattttgaccacttagtggccttcgttggaaacgggtttttttcatgtaaggctagacagaagaattcccagtaacttccttgtgttgtgtgcattcaactcacagagatgaacgttcccttagacagagcagatttgaaacactctatttgtgcaatttgcaagtgtagatttcaagcgctttaaggtcaatggcagaaaaggaaatatcttcgtttcaaaagtagacagaatcattcccacaaactgcgttgtgatgtgttcgttcaactcacagagtttaacctttcttttcatagagcagttaggaaacactctgttggtaaattctgtaagtggatattctgacatcttgtggccttcgttggaaacaggatttcttcatattctgctacacagaagaattctcagaatcttccttgtgttgtgtgtattcaactcacagagttgaacgatcctttacacagagcagacttgaaacactctttttgtggaatttgcaagtggagatttcagccgctttgaggtcaaaggtagaaaatgaagtatcttcgtataaaaactagacagaatgattctcagaaactcctttgtgatgtgtgtgttcaactcacagagtttaacctttcttttcatagagcagttaggaaacactctgtttgtaaagtctgcaagtggatattcagacctctttgaggccttcgttggaaacgggttttttcatataaggctagacaaaaagaattctcagtaacttccttgtgttgtgtgtattcaactgacagagttgaactttcatttagacagagcagatttgaaacactctttttctggaatttgcaagtggagatttcaagcgctttgaggccaaaggcagaaaaggaaatatcttcgtataaaaactacacagaatcattctcagaaactgctctgcgatgtgtgcgttctactctcagagtttaacttttcttttcattcagcagtttggaaacactctgtttgtaaagtctgcacgtggataacttgaccacttagaggccttcattggaaacgggtttttttcatgtaaggctagacagaagaattctcagtaacttccttgtgttgtgtgtattcaactcacagagttgaacgatcctttacacagggcagacttgaaacactctttttgtggaatttgcaagtggagatttcagcctctttgaggttaatggtagaaaatgaaatatcttcctatagaaactagacagattgattctcagaaactcctttgtgatgtgtgcgttcaagtcacagagtttaacctttcttttcatacagcagttaggaaacactctgtttgtaaagtctgcaagtggatattcagacctctttgtggccttcgttggaaacgggatttcttcatattctgctagacagaagaattctcagtaacttccttgtgttgtgtgtattcaactcacagagttgaacgatcctttacacagagcagacttgaaacactctttttgtggaatttgcaagtggagatttcagccgctttgaggtcaatggtagaaaagggaatatcttcgtatagaaactagacagaatgattctcagaaactcctttgtgatgtgtgtgttcaactcacaggagtttaacctttcttttcatagagcagttaggaaacactctgtttgtaaagtctgcaagtggatattcagacctcgttgaggccttcgttggaaacgggatttcttcatattctgctagacagaagaattctcagtaacttccttgtgttgtgtgtattcaaactgacagagttgaactttcatttagagagagcagatttgaaacactgtttttgtggaatttgcaagtggagatttcaagcgctttggggccaaaggcagaaaaggaaatatcttcgtataaaaactagacagaatcattctctgaaactgctctgtgatgtgtgcgttcaactctcagagtttaacttttcttttcattcagcagtttggaaacactctgtttgtaaagtctgcacgtggatattttgaacacttagaggccttcgttggaaacgggtttttttcatgtaaggctagacagaagaattcccagtaacttccttgtgttgtgtgcattcaactcacagagttgaacgttcccttagacagagcagatttgaaacactctatttgtccaatttgcaagtgtagatttcaagcgctttaaggtcaacggcagaaaaggaaatatcttcgtttcaaaactagacagaatcattcccacaaactgcgttgtgatgtgttcgttcaacacacagagtttaacctttcttttcatagagcagttaggaaacagtctgtttgtaaattctgtaagtggatattctgacatcttgtggccttcgttggaaacgggatttcttcatattctgctagacagaagaattctcagtaacttccttgtgttgtgtgtattcaactcacagagttgaacgatcctttacacagagcggacttgaaacactctttttgtggaatttgcaagtggagatttcagccgcgttgaggtcaatggtagaaaaggaaatatcttcgtatagaaactagacagaatgattctcagaaactcttttgtgatgtgtgcgttcaactcacagagttcaacctttcttttcatagagcagttgggaaacactctgtttgtaaagtctgcaagtggatattcagacttctttgaggccttcgttggaagcgggatttcttcatattctgcttgacagaagaattcccagtaacttccttgtgttgtgtgtgttcaactcacagagttgaactttcatttacacagagcagatttgaaacactctttttgtggaatttgcaagtggagatttcaagcagtttgaggccaaaggtagaaaaggaaatatcttcgtttcaaaactagacagaatcattctcagaaactgctctgcgatgtgtgcgttcaactctcagagtttaacttttcttttcattcagcagtttggaaacactttgtttgtaaagtctgcacgtggatattttgaccacttagaggccttcgttggaaacgggtttttttcctgtaaggctagacagaagaattcccagtaacttccttgtgttgtgtacattcaactcacatagttgaacgttcccttagacagagcagatttgaaacactctttttgtgcaattggcaaatggagatttcaagcgctttaaggtcaatggcagaaaaggaaatatcttcgtttcaaaactagacagaatcattcccacaaactgcgttgtgatgtgttcattcaactcacagagtttaacctttctgttcatagagcagttaggaaacactctgtttgtaaagtctgtaagtggatattctgacatcttgtggccttcgttggaaacgggatttcttcatattctgctagacagaagaattctcagaaacttccttgtgttgtgtgttttcaactcacagagttgaacgatcctttacacagagcagacttgcaacactccttttgtggaatttgcaagtggagatttcatccgctttgaggtcaatggtagaataggaaatatcttcctatagaaagtagacagaatgattctcagaaactcctttgtgatgtgtacgttcaactcacagagtttaacttttcttttcatagagcagttaggaaacactctgtttgtaaagtctgcaagtggatattcagacctctttgaggccttcgttggaaacgggtttttttcatataaggctagacagaagaattcccagtaactttccttgtgttgtgtgtgttcaactcacagagttgaactttcatttacacagagcagatttgaagcactctttttgtggaatttgcaagtggagatttcaagcgctttgaggccaaaggcagaaaaggaaatatcttcgtttcaaaactagacagaatcattctcagaaactgctctgtgatgtgtgcgttcaactctcagagtttaacttttcttttcattcagcagtttggaaacactctgtttgtaaagtctgcacgtggatattttgaccacttagaggccttcgttggaaacgggtttttttcatgtaaggctagacaggagaattcccagtaacttccttgtgttgtgtacattcaactcacagagttgaacgttcccttagacagagcagatttgaaacactctttttgggcaattggcaagtggagattacaagcgctttaaggtcaatggcagaaaaggaaatatcttcgtatcaaaactagacagaatcattcccacaaactgcgttgtgatgtgttcgttcaactcacagagtttaacctttctgttcatagagcagttaggaatcactctgtttgtaaactctgcaagtggatattcagacctctttgaggccttcgttggaaacgggatttcttcatattatgctagacagaagaattctcagtaacttccttgtgttgtgtgtattcaactcacagagttgaacgatcctttacacagagcagacttgtaacactctttttgtggaatttgcaagtggagatttcaagcgctttgaggccaaaggcagaaaaggaaatatcttcgtttcaaaactagacagaatgattctcagaaactcctttgtgatgtgtgcgttcaactcacagagttttacctttcttttcatagagcagttaggaaacactctgtttctaaagtctgcaagtgaatattcagacctctttgaggccttcgttggaaacgggttttttcatataaggctagacagaagaattcccagtaacttccttgtgttgtgtgtgttcaactcacagagttctacattcatttacacagagcagatttgaaacactctttttgtggaatttgcaagtggagatttcaagcgctttgaggccaaaggcagaaaaggaaatatcttcgtataaaaactagacagaatcatgctgagaaactgctctgcgatgtgtgcgttcaactctcagaagtttaacttttcttttcattcagcagtttggaaacactctgtttgtaaagtctgcacgtggataacttgaccacttagaggccttcgttggaaacgggtttttttcatgtaaggctagacagaggaattcccagtaacttccttgtgttgtgtacattcaactcacagagttgaacgttcccttagacagagcagatttgaaacactctttttgtgcaattggcaagtggagatttcaagcgctttaaagtcaatggcagaaaaggaaatatcttcgtttcaaaactagacagaatcattcccacaaactgcgttgtgatgtgttcgttcaactcacagagtttaacatttcttttcatagagcagttaggaaacagtctgtttgtcaattctgtaagtggatattctgacatcttgtggccttcgatggaaacgggatttcttcatattctgctagagagaagaattctcagtaacttccttgtgttgtgtgtattcaactcacagagttgaacgatcctttacagagagcagacttgaaacactctttttgtggaattcgcaagtggagatttcagccgctttgaggtcaatgatagaataggaaatatcttcctatagaaactagacagaatgattctcagaaactcctttgtgatgtgtgcgttaaactcacagagtttaacctttctgttcatagagcagttaggaaacactctgtttgtaaagtctgcaagtggatattcagacctccttgaggccttcgttggaaacgggatttcttcctattctgctagacagaagaattctcagtaacttccttgtgttgtgtgtattcaactgacagagttgaactttcatttagagagagcagatttgaaacactgtttttgtggaatttgcaagtggagatttcaagcgctttgcggccaaaggcagaaaaggaaatatcttcgtataaaaactagacagaatcattctcagaaactgctgcgtgatgtgtgcgttcaactctcagactttaacttttcttttcattcagccgtttggaaacactctgtttgtaaagtctgcacgtggatattttgaccacttagaggccttcgttggaaacgggtttttttcctgtaaggctagacagaagaattcccagtaacttccttgtgttgtgtgcattcaactcacagagttgaacgttcccttagacagagcagatttgaaacactctatttgtgcaatttgtagtgtagatttcaagcgctttaaggtcaatggcagaaaaggaaatttcttcgtttcaaaactagacagaatcattcccacaaactgcgttgtgatgttttcgttcaactcacagagtttaacctttctgttcatagagcagttaggaaacactctgtttgtaaagtctgtaagtggatattctgacatcttgtggccttcgttggaaacgggatttcttcatattctgctagacagaagaattctcagtaacttccttgtgttgtgtgtattcaaatcacagagtggaatgatcctttacacagagcagacttgaaacactctttttgtggaatttgcaagtggagatttcagccgctttgaggtcaatggtagaaaaggaaatatctacgtataaagattagacagaatgattctcagaaactcctttgtgatgtgtgcgttcaactcacagagtttaacctttcttttcatagagcagttaggaaacactctgtttataaagtctgcaagtggatattcagacctctttgaggccttcgttggaaacgggatttcttcatattctgctagacagaagaattctcagtaacttccttgtgttgtgtgtattcaactgacagagttgaactttcatttagagagagcagatttgaaacactgtttttgtggaatttgcaagtggagatttcaagcgctttggggccaaaggcagaaaacgaaatatcttcgtatataaactagacagaatcattctcagaaactgctgcgtgatgtgtgcgttcaactctcagagtttaacttttcttttcattcagcggtttggagacactctgtttgtaaagtctgcacgtggatattttgaccacttagaggccttcgttggaaacgggtttttttcatgtaaggctagacagaagaattcccagtaacttccttctgttgcttacattcagctcacagagttgaacgttcccttagacagagcagatttgaaacactctttttgtgcaattggcaagtggagatttcaagcgctttaaggtcagtggcagaaaaggaaatatcttcgtttcaaaactagacagaatcattcccaaaaactgcgttgtgatgtgttcgttcaactcacagagtttaacctttctgttcatagagcagttaggaaacactctgtttgtaaagtctgtaagtggatattctgacatcttgtggccttcgttggaaacgggatttcttcatattctgctagacagaagaattctcagtaacttccttgtgttgtgtgtattcaactcacagagttgaacgattctttacacagagcagacttgaaacactctttttgtgaaatttgcaagtggagatttcagccgctttgagttcaatggtagaataggaaatatcttcctatagaaactagacagaatgattctcagaaactcctttgtgatgtgtgcgttcaactcacagagttcaacctttcttttcatagagcagttgggaaacactctgttcgtaaagtctgcaagtggatattcagacttctttgaggccttcgttggaagcgggatttcttcaaattctgctagacagaagaattcccagtaacttccttctgttgtgtgtgttcaactcacagagttgaactttcatttacacagagcagatttgaaacactctttttgtggaatttgcaagtggagatttcaagcgctttgaggccaaaggcagaaaaggaaatatcttcgtataaaaactagacagaatcattctcagaaaccgctctgtgatgtgtgcgttcaactctcagagtttaacttttcttttcatttagcagtttggaaacactctgtttgtaaagtctgcacgtggatattttgaacacttagaggccttcgttggaaacgggtttttttcatgtaaggctagacagaagaattcccagtaacttccttgtgttgtgtgcattcaactcacagagttgaaccgttcccttagacagagcagatttgaaacactctatttgtgcaatttgcaagtgtagatttcaagcgctttaaggtcaacggcagaaaaggaaatatcttcgtttcaaaactagacagaatcattcccacaaactgcgttgtgatgtgttcgttcaactcacagagtttaacctttctgttcatagagcagttaggaaacactctgtttgtaaagtctgtgagtggatattctgacatcttgtggccttcgttggaaacgggatttcttcatattctgctagacagaagaattctcagtaacttccttgtgttgtgtgtattcaactcacagagttgaacgatcctttacacagagcagacttgaatcactctttttgtggaatttgcaagtggagatttcagccgctttgagttcaatggtagaataggaaatatcttcctatagaaactacacagaatgattctcagaaactcctttgtgatgtgtgcgttcaactcacagagtttaacctttcttttcatagagcagttaggaaacactctgtttggaaagtctgcaagtggatattcagacctctttgaggccttcgttggaaacgggtttttttcatataaggctagacagaagaattctcagtaacttccttgtgttgtgtgtattcaactcacagagttgaacgatcctttacacagagcagacttgtaacactctttttgtggaatttgcaagtggagatttcaagcgctttgaggccaaaggcagaaaaggaaatatcttcgtataaaaactagacagaatcattctcagaaactgctctgcgatgtgtgcgttcaactctcagagtttaacttttcttttcattcagcagtttggaaacactctgtttgtaaagtctgcacgtggatattttgaccacttagaggccttcgttggaaacgggtttttttcatttaaggctagacagaagaattcccagtaacttccttgtgttgtgtgcattcaagtcacagagttgaacgttcccttagacagagcagatttgaaacactctatttgtgcaatctccaagtgtagatttcaagcggtttaaggtcaacggcagaaaaggaaatatcttcgtttcaaaactagacagaatcattctcagaaactcctttgtgatgtgtgcgttcaactcacagagtttaacttttcttttcatagagccgttaggaaacactctgtttgtaaagtctgcaagtggatattcagacctctttgaggccttcgttggaaacgggatttcttcatattatgctagacagaagaattctcagtaacttccttgtgttgtgtgtattcaactcacagagttgaacgatcctttacacagagcagacttgaaacattctttctgtggaatttgcaagtggagatttcagccgctttgaggtcaatggtagaataggaaatattttcctatagaaactagacagaatgattctcagaaacttctttgtgatgtgtgcgttcaactcacagagtttaacttttcttttcatagagcagttaggaaacactctgcttgtaatctctgcaagtggatattcagtcctctttgaggccttcgttggaaacgggatttcatcatactatgctagacagaagaattctcagtaacttccttgtgttgtgtgtattcaactgacagagttgaactttcatttagagagagcagatttgaaacactctttttgtggaatttgcaagtggagatttcaagcgctttggggccaaaggcagaaaaggaaatatcttcgtataaaaactagacagaatcattctcagaaactgctctgcgatgtgtgccttcagcgctcagagtttaacttttcttttcattcagcagtttggaaacactctgtttgtaaagtctgcacgtgtatattttgaccacttagaggccttcgttggaagcgggtttttgtcatgtaaggttagacagaataattcccagtaacttccttgtgttgtgtacattcaacttacagagttgaacgttcccttggacagagcagatttgaaacactctttttgtgcaattggcaagtggagatttcaagcgcttaaggtcaatggcagaaaaggaaatatcttcgtttcaaaactagacagaatgattctcagaaactcctttgtgatgtgtgcgttcaactcacagagtttaacctttcttttcatagagcagttaggaaacactctgtttgcaaagtctgcaagtggatattcagacctctttgaggccttctttggaaacgggatttcttcatattatgctatacacaagaattctcagtaacttccttgtgttgtgtgtattcaactcacagagttgaacgatctcttacacagagcagagttgaaacactctttttctggaatttgcaagtggagatttcagccgctttgaggtcaaaggtagaataggaaatatcttcctatagaaactagacagaatgattctcagaaactcctttgtgatgtgtgcgttcaacacacagagtttaacctttcttttcatagagcagttagggaacactctgtttgtaaagtctgcaagtggatattcagacctctttgaggccgtcgttggaaacgggatttcttcatattatgctagacagaagaattcccagtaacttccttgtgttgtgtgtattcaactcacagagttgaactttcatttacacagagcagatttgaaacactctttttgtggaatttgcaaatggagatttcaagcgctttgaggccaaaggcagaaaaggaaatatcttcgtataaaaactagacagaatcattctcagaaactgctctgcgatgtgtgcgttcaactctccgagtttaacttttcttttcattcagcagtttggaaacactctgtttgtaaagtctgcacgtggataatttgaccacttagaggccttcgttggaaacgggttttttttcatgtaaggctagacagaagaattcccagtaacttccttgtgttgtgtacattcaactcacagagttgaacgttcccttagacagagcagatttgaaacactctttttgtgcaattggcaagtggtgatttcagccgctttgaggtcaatggtagaaaaggaaatatcttcgtataaaaactagacagaatgattctcataaactcctttgtgatgtgtgcgttcaactcacagagtttaacctttctgttcatagagcagttaggaaacactctgtttgtaaagtctgtaagtggatattctgacatcttgtggccttcgttggaaacgggatttcttcatattctgctagacagaagaattctcagaatcttccttgtgttgtgtgtattcaactcacagagttgaacgatcctttacacagagcagacttgaaacactctttttgtggaatttgcaagtggagatttcagccgctttgaggtccatggtagaaaaggaaatatcttcgtctaaaaactagacagaatgattctcataaactcctttgtgatgtgtgcgttcaactcacagagtttaacttttcttttcatagaggagttaggaaacactctgtttgtaaagtctgcaagtggatattcagacctctttgaggccttcgttggaaacgggatttcttcatattctgctagacagaagaattctcagtaacttccttgtgttgtgtgtattcaactcacagagttgaacgatcctttacacagagcagacttgaaacactctttttgtggaatttgcaagtggagatttcagcctctttgaggtcaatagtagaaaaggaaatatcttcgtagaaaaactagacagaatcattctcaaaaactgctgcgtgatgtgtgcgttcaactctcagactttaacttttcttttcattcagccgtttggaaacactctgtttgtaaagtctgcacgtggatattttgaccacttagaggccttcgttggaaacgggtttttttcatgtaaggctagacagaagaattctcagtaacttccttgtgttgtgtgtattcaactcacagagttgaacgatcctttactcagagcaggcttgaaacactccttttgtggaacttgcaattggagatttcagccgctttgaggtcaatggtagaataggaaatatcttcctatagaaactagacagaatgattctcagaaactcctttgtgctgtgtgcgttcagctcacagagtttaacctttcttttcatagagccgttaggaaacactctgtttgtaaagtctgcaagtggatattcagacgtctttgaggccttcgttggaaacgggatttcttcatattctgctagacagaagaattctcagaaacttccttgtgttgtgtgttttcaactcacggagttgaacgatgctttacacagagtagacttgaaacactctttttgtgtaatttgcaagtggagatttcagccgctttgaggtcaatggtagaaaaggaaatatcttcgtataaaaactagacagaatgattctcagaaactcctttgtgatgtgtgtgttcaactcacagagtttaacctatcttttcatagagcagttagtaaacactctgtttataaagtctgcaagtggatattcagacccctttgaggccttcgttggaaacgggatttcttcatattatgctagacagaagaattctcagtaacttccttgtgttgtgtgtattcaactgacagagttgaactttcatttagagagagcagatttgaaacactgtttttgtggaatttgcaaatggagatttcaagcgctttggtgccaaaggcagaaaaggaaatatcttcgtataaaaactagacagaatcattctcagaaactgctctgcgatgtgtgcgttcaactctcagagtttaacttttcttttcattcagcagtttggaaacactctgtttgtaaagtctgcacgtggataatttgacctcttagaggccttcatttgaaacgggtttttttcatgtaaggctagacagaagaattcccagtaacttccttgtgttgtgtgcattcaagtcacagagttgaacgtttccttagacagagcagaattgaaacactctatttgtgcaatttgcaagtgtagatttcaaccgctttaaggtcaacggcagaaaaggaaatatcttcgtttcaaaactagacagaatcattcccacaaactgcgttgtgatgcgtttgttcaactcacagagtttaacctttcttttcatagagcagttaggaaacagtctgtttgtaaattctgtaagtggatattctgacatcttgtggcctcgctggaaacgggattacttcatattctgctagacagaagaattctcagtaacttccttgtgttgtgtgtattcaactctcagagttgaacgatcctttacacagagcagacttgaaacactctttttgtggaatttgcaagtggagatttcagccgctttgaggtcaatagtagaaaaggaaatatcttcgtagaaacactagacagaatgattctcagaaacttctttgtgatgtgtgcgttcaactcacagagtttaacctttcttttcatagggcagttaggaaacactctgtttgtaaactctgcaagtggatattcagacctctttgaggccttcgttggaaacgggatttcttcatactatgctagacagaagaattctcagtaacttccttgtgttgtgcttattcaactgacagagttgaacattcatttagagagagcagatttgaaacactgtttttgtggaatttgcaagtggagatttcaagcgctttggggccaaaggcagaaaacgaaatatcttcgtataaaaactagacagaatcattctcagaaactgctgcgtgatgtgtgcgttcaactctcagagtttaacttttcttttcattcaccggtttggaaacactctgtttgtaaagtctgcacgtggacattttgaccacttagaggtcttctttggaaacgggtttttttcatgtaaggctagacagaagaattcccagtaacttccttgtgttgtgtgcattcaactcacagagatgaacgttcccttagacagagcagatttcaaacactctatttgtgcaatttgcaagtgtagatttcaagcgctttaaggtcaatggcagaaaaggaaatatcttcgtttcaaaactagacagaatcattcccacaaactgcgttgtgaagtgctcgttcaactcacagagtttaacctttctgttcatagagcagttaggaaacactctgtttgtaaagtctgtaagtggatattctgacatcttgtggccttcgttggaaacggaatttcttcatattctgctagacagaagaattctcagtaacttccttgtgttgtgtgtattcaactcacagagttgaacgatcctttacacagagcagacttgaaacactctttttgtggaatttgcaagtggagatttcagccgctttgagttcaatggtagaataggaaatatcttcctgtagaaactagacagaatgattctcagaaactcctttgtgatgtgtgcgttcaactcacagagttcaacctttcttttcatagagcagttgggaaacactctgtttgtaaagtgtgcaagtggatattcagacttctttgaggccttcgttggaagcgggatttcttcatgttctgctagaaagaagaattctcagtaacttccttgtgttgtgtgttttcaactgacagagttgaactttcatttagagagagcagatttgtaacactgtttttgtggaatttgcaagtggagatttcaagcgctttggggccaaaggcagaaaaggaaatatcttcgtataaaaactagacaaaatcattctcagaaactgctctgcgatgtgtgcgctcaactctcagagtttaacttttcttttcattcagcagtttggaaacactctgtttgtaaagtctgcacgtggatattttgaccacttagaggccttcgttggaaacgggtttttttcctgtaaggctagacagaagaattcccaggaacttccttgtgttgtgtacattcaactcacagagttgaacgttcccttagacagagcagatttgaaacactctttttgtgcaattggcaaatggagatttcaagcgctttaagttcaatggcagaaaaggaaatatcttcgtttcaaaactagacagaatcaatcccacaaactgcgttgtgatgtgttcgttcaactcacagagtttaacctttctgttcatagagcagttaggaaacactctgtttgtaaagtctgtaagtggatattctgacattttgtggccttggttggaaatggcatttcttcatatactccaagacagaagaattctcagtaacttccttgtgttgtgtgtattcaactcacagagttgaacgatcctttacacagagcggacttgtaacactctttttgtggaatttgcaagtggagatttcagccgctttgaagtcaaaggtagaaaaggaaatatcttcctataaaaactagacagaatgattctcagaaactcctttgtgatgtgtgcgttcaacacacagagtttaacttttcttttcatagagcagttaggaaacactctgtttgtaaagtctgcaagtggatattcagacctctttgaggccttcgttggaaacggaatttcttcatattatgctagacagaagaattcccagtaacttccttgtgttgtgtgtattcaactcacagagttgaactttcatttacacagagcagatttgaaacactctttttgtggaatttgcaagtggagatttcaagcgctttgaggccaaaggcagaaaaggaaatatcttcgtataaaaactagacagaatcattctcagaaactgctctgcgatgtgtgcgttcaactctcagagtttaacttttcttttcattcagcagtttggaaacaatctgtttgtaaagtctgcacgtggataatttgaccacttagaggccttcgttggaaacgggtttttttcctgtaaggctagacagaagaattcccagtaacttccttgtgttgtgtacattcaactcacagagttgaacgttcccttagacagagcagatttgaaatactctttttgtgcaattggcaagtggagatttcaagcgctttaaggtcaatggcagaaaaggaaatatctgcgtttcaaaactagacagaatcattcccacaaactgcgttgtgatgtgttcgttcaactcacagagtttaacctttcttttcatagagcagttaggaaacactctgtttgtaaattctgtaagtggatattctgacatcttgtggccttcgtttgaaacgggatttcttcatattctgctagacagaagaattctcagtaactttccttgtgttgtgtgtattcaactcacagagttgaacgatcctttacacagagcagacttgtaacactctttttgtggaatttccaagtggagatttcagccgctttgaagtcaaaggtagaaaaggaaatatcttcctataaaaactagacagaatgattctcagaaactcctttgtgatgtgtacgttcaactcacagagtttaacctttcttttcatagagtagttaggaaacactctgtttgtaaagtctgcaagtggatattgagacctctttgaggccttcgttggaaacgggtttttttcatataaggctagacagaagaattcccagtagcttccttgtgttgtgtgtgttcaactcacagagttgaactttcatttacacagagcagatttgaaacactctttttgtggaagttgcaagtggagatttcaagcgctttgaggccaaaggcagaaaaggaaatatcttcgtttcaaaactagacagaatcattctcagaaactgctctgtgatgtgtgcgttcaactctcagagtttaacttttcttttcattcagcagtttggaaactctctgtttgtaaagtctgcacgtgcatattttgaacacttagaggccttcgttggaaacgggtttttttcatgtaaggctagacagaagaattcccagtaacttccttgtgttgtttgcattcaactcacagagttgaacgttcccttagacagagcagatttgaaacactgtatttgtgcaatttgcaagtgtagatttcaagcgctttaaggtcaatggcagaaaaggaaatatcttcgtttcaaaactagacagaatcattcccacaaactgcgttgtgatgtgttcgttcaactcacagagtttaacctttctgttcatagagcagttaggaaacactctgtttgtaaagtctgtaagtggatattctgacatctagtggccttcgttggaaacgggatttcttcatattctgctagacagaagaattctcagtaacttccgcgtgttgtgtgtattcaactcacagagttgaacgatcctttacacagagcagacttgtaacactctttttgtggaatttgcaagtggagatttcagccgctttgaagtcaaaggtagaaaaggaaatatgttcctataaaaactagacagaatgattctcagaaactcctttgtgatgtgtgcgttcaactcacagagtttaacctttcttttcatagagcagttaggaaacactctgtttgtaaagtctgcaagtggatattcagacctcttagaggccttcgttggaaacggttttttttcatataaggctagacagaagaattctcagtaactttccttgtgttgtgtgtattcaactcacagagttgaacgatcctttacacagagcagacttgtaaaactctttttgtggaatttgcaagtggagatttcagccgctttgaagtcaaaggtagaaaaggaaataacttcctataaaaactggacagaaatcattctcagaaactgctctgcgatgtgtgcgttcaactctcagcagtttaacttttcttttcattcagcagtttggaaacactctgtttgtaaagtctgcacgtggataatttgaccacttagaggtcttcgttggaaacgggtttttttcatgtaaggctagacagaagaattcccagtaacttccttgtgttgtgcgcattcaactcacagagttgaacgttcccttagacagagcagatttgaaacactctatttgtgcaatttgcaagtgtagatttcaagcgctttaaggtcaacgccagaaaaggaaatatcttcatttcaaaactagacagaatcattcccacaaactgcgttgtgatgtgttcgttcaactcacagagtttaacttttcttttcatagagcagttaggaaacactctgtttgtaaagtctgtaagtggatattctgacatcttgtggccttcgttggaaacgaggattttcttcatattctgctagacagaagaattctcattaacttccttgtgttgtgtgtattcaactcacagagttgaacgatcctttacacagagcagacttgtaacactctttttgtggaatttgcaagtggagatttcagccgctttgaaatcaaaggtagaaaaggaaatatcttcctataaaaactagacagaatgattctcagaaactcctttgtgatgcgtgcgttcaactcacagagtttaacctttcttttcatagagcagttaggaaacactctgtttgtaaagtctgcaagtggatattcagacctctttgaggccttcgttggaaacgggtttttttcatagaaggctagacagaagaattctcagtaacttccttgtgttgtgtgtattcaactgacagagttgaactttcatttagagagagctgatttgaaacactgtttttgtggaatttgcaagtggagatttcaagcgctttggggccaaaggcagaaaaggaaatatcttcgtataaaaactagacagaatcattctcagaaactgctgcgtgatgtgtgcgttcaactcttagagtttaacttttcttttcattcagcggtttggaaacactctgtttgtaaagtctgcacgtggatattttgaccacttagaggccttcgttggaaacgggttttttgcatgtaaggctagacagaagaattcccagtaacttccttgtgttgtgtgcattcaactcacagagttgaacgttcccttagacagagcagatttgaaacactctatttgtgcaatttgcaagtgtagatctcaagcgctttaaggtcaatggcagaaaaggaaatatcttcgtttcaaaactagacagaatgattctcataaactcctttgtgatgtgtgcgttcaacacacagagtttaacctttctgttcatagagcagttaggaaacactctgtttgtaaagtctgcaagtggatattcagacctccttgaggccttcggtggaaacgggatttcttcatattctgctagacagaataattctcagtaacttccttgtgttgtgtgtattcaactcacagagttgtacgatcctttacagagagcagacttgaaacactctttttgtggaatttgcaagtggagatttcagcagctttgaggtcaacggtagaataggaaatatcttcctatagaaactagacagaatgattctcagaaactcctttgtgatgtgtgcgttcaactcacagagtttaacctttcttttcatagagcagttaggaaacactctgtttgtaaagtctgcaagtggatattcagacctctttgaggccttcgttggaaacgggttttttcatataaggctagacagaagaattcccagtaacttctttgtgttgtgtgtgttcaactcacagagttgaactttcatttacacagagcagatttgaaacactctttttgtggaatttgcaaatggagatttcaagcgctttgaggccaaaggcagaaaaggaaatatcttcgtataaaaactagacagaatcattctcagaaactgctctgcaatgtgtgcgttcaactctcagagtttaacttttcttttcattcagcagtttggaaacactctgtttgtaaagtctgcacgtggataatttgaccacttagaggccttcgttggaaacgggtttttttcatgtaaggctagacagaagaattctcagtaacttccttgtgttgtgtgtattcaactcacagagttgaacgatcctttacacagagcagacttgtaacactctttttgtggaatttgcaagtggagatttcagccgctttgaagtcaaaggtagaaaaggaaatgtcttcctataaaaactagacagaatcattcccacaaactgcattgtgatgtgttcgttcaactcacagagtttaacctttcttttcatagagcagttaggaaacactctgttggtaaattctgtaagtggatattctgacatcttgtggccttcgttggaaacgggatttcttcatattctgctacacagaagaattctcagtaacttccttgtgttgtgtgtgttcaactcacagagttgaacgatcctttacacagagcagacttgaaacactctttttgtggaatttgcaagtggagatttcagccgctttgagttcaatggtagaataggaaatatcttcctatagaaactagacagaatgattctcacaaaatcttttgtgatgtgtgcgttcaactcacagagtttaacttttcttctcatagagcagttaggaaacactctgtttgtaaagtctgcaagtggatattcagacctctttgaggccttcgttggaaacgggatttcttcatattctgctagacagaagaattcccagtaacttccttgtgttgtgtgtgttcaactcacagagttgaactttcatttacacagagcagatttgaaacactctttttgtggaatttgcaaatggagatttcaagcgctttgacgccaaaggcagaaaaggaaatatcttcgtataaaaactagacagaatcattctcagaaactgctctgcgatgtgtgcgttcaactctcagagtttaacttttcttttcattcagcagtttggaaacactctgtttgtaaagtctgcacgtggatattttgaccacttagaggccttcgttggaaacgggtttttttcctgcaaggctagacagaaaaattcccagtaacttcccgtgtgttgtgtgcattcaactcacagagttgaacgttcccttagacagagcagatttgaaaaactccttttgtgcaatttggaattggagatttcaagcgctttaatgtcaatggcagaaaagaaaataccttcgtttcaaaactagacagaatcattcccacaaactgcgttgtgatgtgttcgttcaactcacagagtttaacctttcttttcatagagcagttaggaaacagtctgtttgtcaattctgtaagtggatattctgacatcttgtggtcttcgttggaaacgggatttcttcatattctgctagacagaagaattctcagtaacttccttgtgttgtgtgtattcaactcacagagttgaacgatcctttacactgagcagacttgaaacattctttttgtggaatttgcaagtggagatttcagccgctttgaggtcaatggtagaataggaaatatcttcctatagaaattagacagaatgattctcagaaactcctttgtgatgtgtgtgttcaactcacagagtttaacctttcttttcatagagcagttagtaaacactctgtttataaagtctgcaagtggatattcagacccctttgaggccttcgttggaaacggcatttcttcatattatgctagacagaagaattctcagtaacttccttgtgttgtgtgtattcaagtgacagagttgaactttcatttagagagagcagatttgaaacagtgtttttgtggaatttgcaagtggagatttcaagcgctttggggccaaaggcagaaaaggaaatatcttcgtataaaaactagacagaatcattctcagaaactgctctgcgatgtgtgcgttcaactctcagagtttaacttttcttttcattcagcagtttggaaacactctgtttgtaaagtctgcacgtggatattttgaccatttagaggccttcgttggaaacgggtttttttcttgtaaggctagacagaagaattcccagtaacttccttgtgttgtgtacattcaactcacagggttgaacgttcccttagacagagcagatttgaaacactctttttgtgcaattggcaagtggagatttcaagcgctttaaggtcaatggcagaaaaggaaatatcttcgtttcaaaactagacagaatcattcccacaaactgcgttgtgatgtgttcgttcaactcacagagtttaacctttcttttcatagagcagttaggaaacagtctgtttgaaaattctgtaagtagatattctgacagcttgtggccttcgttggaaacgggatttctttatattctgctagacagaagaattctcagtaacttccttgtgttgtgtgtattcaactcacagagttgaacgatcctttacacagaccagacttgtaacactctttttgtggaatttgcaagtggagatttcagccgctttgaagtcataggtagaaaaggaaatatcttcgtataaaaactagacagaatgattctcagaaactcgtttgtgatgtgtgcgttcaactcacagagtttaacctttcttttcatagagcagttaggaaacactctgtttgtaaagtctgcaagtggatattcagacctctttgaggccttcgttggaaacggggttttttcatataaggctagacagaagaattcccagtaacttccttgtgttgtgtgtgttcaactcacagagttgaactttcagttacacagagcagatttgaaacactctttttgtggaatttgcaagtggagatttcaagcgctttgaggccaaaggcagaaaaggaaatatcttcgtttcaaaactagacagaatgattctcagaatctcctttgtgatgtgtgcgttcaactctcagagtttaacttttcttttcattcagcggtttggaaacactctgtttgttaagtctgcacgtggatattttgaccacttagaggccttcgttggaaacgggtatttttcatgtaaggctagacagaagaattcccagtaacttccttgtgttgtgtgcattcaactcacagagttgaacgttcccttagacagagcagatttgaaacactctatttgtgcaattggcaagtggagatttcaagcgctttaaggtcaatggcagaaaaggaaatatcttcgtttcaaaactagacagaatcattcccacaaactgcgttgtgatgtgttcgttcaactcacagagtttaacatttctgttcatagagcagttaggaaacactctgtttgtaaagtctgtaagtggatattcagacatcttgtggccttcgttggaaacgggatttcttcctattctgctagacagaagaattctcagtaacttccttgtgttgtgtgtattcaactcacagagttgaaggatcctttacagagagcaggcttgaaacactctttttgtcgaatttgcaagtggagatttcagccgctttgaggtcaatggtagaataggaaatatcttcttatagaaactagacagaaatgattctcagaaactcctttgtgatgtgtgtgttcaactcacagagtttaacctttcttttcatagagcagttaggaaacactctgtttgtaaagtctgcaagtggatattcagacctctttgaggccttcgttggaaacgggttgttttcatataaggctagacagaagaattctcagtaacttccttgtgttgtgtgtgttcaattcacagagttgaactttcatttacacagagcagatttgaaacactctttttgtggaatttgcaagtggagatttcacgcgctttgaggccaaaggcagaaaaggaaatatcttcgtttcaaaactagacagaatcattctcagaaactgctctgcgatgtgtgcgttccactctcagagtttaacttttcttttcattcagcagtttggaaacactctgtttgtaaagtctgcacgtggatattttgaccacttagaggccttcgttggaaacgggtttttttcctgtaaggctagacagaagatttcccagtaacttccttgtgttgtgtgcattcaactcacagagttgaacgttccgttagacagagcagatttgaaacactctatttgtgcaatttgcaagtgtagatttcaagcgctttaaggtcaatggcagaaaaggaaatatcttcgtttcaaaactagacagaacgattctcagaaactcctttgtgatgtgtgcgttcaactcacagagtttaacctttcttttcatagagcagttaagaaacactctgtttgtaaagtctgcaagtggatattcagaccactttgaggccttcgttggaaacgggatttcttcatattctgctagacagaagaattctcagtaacttccttgtgttgtgtgaattcaactcacagagttgaacgatcctttacacagagcagacttgaaacactcgttttgtggaacttgcaagtggagatttcagccgctttgtggtcaatagtagaataggaaatatcttcctatagaaactagacagaatgattctcagaaaatcctttgtgatgtgtgcgttcaactcacagagtttaacatttcttttcatagagcagttaggaaacactctctttgtaaagtctgcaagtggatattcagacctctttgaggccttcgttggaaacgggatttcttcatattctgctagacagaagaattctcagtaacttccttgtgttgtgtgtattcaactgacagagttgaactttcatttagagagagcagatttgaaacacggtttttgcggaatttgcaagtggagatttcaagcgctttggggccaaaggcagaaaaggaaatatcttcgtataaaaactagacagaatcattctcagaaactgctctgcgatgtgtgcgttcaactctcagagtttaacttttcttttcattcagcagtttggaaacactctgtttgtaaagtctgcacgtggataacttgaccacttagaggccttcgttggaaacgggtttttttcctgtaaggctagacagaagaattcccagtaacttccttgtgttgtgtacattcaactcacagagttgaacgttcccttagagcagatttgaaacactctttttgtgcaattggcaagtggagatttcaagcgctttaaggtcaatggcagtaaaagaaatatcttcgtttcaaaactagacagaatgattctcataaactcctttgtgatgtgtgcgttcaacacacagagtttaacctttctgttcatagagcagttaggaaacactctgtttgtaaagtctgtaagtggatattctgacatcttgttgccttcgctggaaacgggatttcttcatattctgctagacagaagaattctcagtaacttccttgtgttgtgtgtattcaactcacagagttgaacgatcctttacacagagcatacttgaaacactcttcttgtggaatgtgcaagtggagatttcagccgctttgaggtccatggtagaataggaaatatcttcctatagaaactagacagaatgattctcatgaactcctttgtgatgtgtgcgttcaactcacagagtttaacctttcttttcatagagcagttaggaaacactctgtttgtaaagtctgcaagtggatattcagacctccttgaggccttcgttggaaacgggatttcttcatattctgctagacagaagaattcccagtaacttccttgtgttgtgtgtgttcaactcacagagttgaactttcctttacacagagcagatttgaaacactctttttgtggaatttgcaagtggagatttcaagcgctttgaggccaaaggcagaaaaggaaatatcttcgtataaaaactagacagaatcattctcagaaactgctctgcgatgtgtgcgttcaactctcagagtttaacttttcttttcattcagcagtttggacacactctgtttgtaaagtctgcacgtggataatttgaccacttagaggccttcgttggaaacgggtttttttcatgtaaggctagacagaagaattcccagtaacttccttgtgttgtgtacggttcaactcacagagttgaacgttcccttagacagagcagatttgaaacactctttttgtgcaattggcaagtggagatttcaagcgctttaaggtcaatggcagaaaaggaaatatcttcgtttcaaaactagacagaatcattcccacaaactgcgttgtgatgtgttcgttcaactcacagagtttaacctttctgttcatagagcagttaggaaatactctgtaaagtctgtaagtggatattctgacatcttgtggccttcgttggaaacgggatttcttcatattctgctagacagaagaattctcagtaacttccttgtgttgtgtgtattcaactcacagagctgaacgatcctttacacagagcagacttgaaacactctttttgtggaatttgcaagtggagatttcagccgctttgaggtcaatggtagaaaaggaaatatcttcgtataaagactagacagaatgattctcagaaactcctttgtgatgtgtgcgttcaactcacagagtttaacttttcttttcatagagcagttaggaaacactctgtttgtaatgtctgcaagtggatattcagacctctttgaggccttcgttggaaacgggaattcttcatattatgctagacagaagaattctcagtaacttccttgtgttgtgtttattcaactcacagagttgaatgatcctttacacagagcagtcttgaaacactctttttgtggaatttgcaagtggagatttcagccgctttgaggtcaatggtagaataggaaatatcttcctatagaaaatagacagaatcattctcagaaactgctgcgtgatgtgtgcgttcaactctcagagtttaacttttcttttcattcagcggtttggaaacactctgtttgtaaagtctgcacgtggatattttgaccacttagaggccttcgttggaaacgggttttttttcatgtaaggctagacagaagaattcccagtaacttcccttgtgttgtgtgcattcaactcacagagttgaacgttcccttagacagagcagatttgaaacactctatttgtgcaatttgaaagtgtagatttcaagcgctttaaggtcaacggcagaaaaggaaatatcttcgtttcaaaactagacagaatcactcccacaaactgcgttgtgatgttttcgttcaactcacagagtttaacctttcttttcatagagcagttaggaaacagtctgtttgaaaattctgtaagtggatattctgacatcttgtggccttcgttggaaacgggatttcttcatattctgctagacagaagaattctcagtaacattccttgtgttgtgtgtattcaactcacagagttgaacgatcctttacacagagcagacttgaaacactctttttgtggaatttgcaagtggagatttcagccgctttgaggtcaatggtagaataggaaatatcttcctatagaaactagacaaaatgattctcataaactcctttgtgatgtgtgcgttcaactcacagagtttaacctttcttttcttagagcagttaggaaacactctgtttgtaaagtctgcaagtggatattcagacctctttgaggccttcgttggaaacgggatttcttcatattctgctagacagaagaattctcagtaacttccttgtgttgtgtgtattcaactgacagagttgaactttcatttagagacagcagatttgaaacactgtttttgtggaatttgcaagtggagatttcaagcgctttggggccaaaggcagaaaaggaaatatcttcgtataaaaactagacagaatcattctcagaaactgctgcgtgatgtgtgcgttcaactctcagagtttaacttttcttttcattcagcggtttggaaacactctgtttgtaaagtctacacgtggatattctgaccacttagaggccttcgttggaaacgggttttttgcatgtaaggctagacagaagaattcccagtaacttccttgtgttgtgtgcattcaactcacagagttgaacgttcccttagacagagcagatttgaaacactctatttgtgcaatttgcaagtgtagatttcaagcgctttaaggtcaatggcagaaaaggaaatatcttcgtttcaaaactagacagaatcattcccacaaactgtgttgtgatgtgttcgttcatctcacagagtttaacctttcttttcatagagcagttaggaaacactatgtttgtaaattctgtaagtggatattctgacatcttgtggccttcgttggaaacgggatttcttcatattctgctagacagaagaattctcaagtaacttccttgtgttgtgtgtattcaactcacagagttgaacgatcctttacacagagcagacttgaaacattctttttgtggaattggcaagtggagatttcagccgctttgaggtcaatggtagaataggaaatatcttcctatagaaactagacagaatgattctcagaaactcctttgagatgtgtgctctcaactcacagagtttaacctttcttttcatagagcagttaggaaacactctgtttgtaaagtctgcaagtggatattcagacctctttgaggccttcgttggaaacgggtttttttcatataaggctagacagaagaattctcaagtaacttccttgtgttgtgtgtattcaactgacagagttgaactttcatttagagagagcagatttgaaacactgtttttgtggaatttgcaagtggagatttcaagcgctttggggccaaaggcagaaaaggaaatatcttcgtataaaaactagacagaatcattctcagaaactgctctgcgatgtgtgcgttcaactctcagagtttaacttttcttttcattcagcagtttggaaacactctgtttgtaaagtctgcacgtggatattttgaccacttagaggccttcgttggaaacgggtttctttcctgtaaggctagacagaagaattcccagtaaattccttgtgttgtgtgcattcaactcacagagttgaacgttcccttagacagagcagatttgaaacactctatttgtgcaatttgcaagtgtagatttcaagcgctttaaaggtcaatggcagaaaagggaatatcttcgtttcaaaactagacagaatcattcccacaaactgcgttgtgatgtgttcgttcaactcacagagtttaacctttctgttcatagagcagttaggaaacactctgtttgtaaagtctgcaagtggatattcagacctcttgaaggccttcgttggaaacgggatttcttcatattctgctagacagaagaatacctagtaacttccttgtgttgtgtgcattcaactcacagagttgaacgatcctttacagagagcaggcttgaaacactctttttgtggaatttgcaagtggagatttcagccgctttgaggtcaatggtagaataggaaatatcttcctatagaaactagacagaatgattctcagaaactcctttgtgatgtgtgcgttcaactcacagagtttaacctttcttttcatagagcagttaggaaacaccctgtttgtaaagtctgcaagtggatattcagacatccttgaggctttcgttggaaacgggatttcttcatattatgctagacagaagaattcccagtaactcccttgtgttgtgtgtgttcaactcacagagttgaactttcatttacacagagcagatttgaaacactctttttgtggaatttgcaaatggaggtttcaagcgctttgaggccaaaggcagaaaaggaaatatcttcgtataaaaactagacagaatcattctcagaaactgctctgcgatgtgtgcgttcaactctcagagtttaacttttcttctcattcagaagtttggaaacactctgtttgtaaagtctgcacgtggataacttgaccacttagaggccttcgttggaaacgggtttttttcatgtaaggctagacagaagaattcccagtaacttccttgtgttgtgtgcattcaactcacagagttgaacgttcccttagacagagcagatttgaaacactctatttgtgcaatttgcaagtgtagatttcaagcgcttttaaggtcaacggcagaaaaggaaatatcttcgtttcaaaactagacagaatcattcccacaaactgcgttgtgatgtgttcgttcaactcacggactttaacctttctgttcatagagcagttaagaaacactctgtttgtaaagtctgcaagtggatattcagacctcctagaggccttcattggaaacgggatttcttcatattctgctagacagaagaattctcagtaacttccttgtgttgtgtgtattcaactcacagagttgaacgatcctttacacagagcagacctgtaacactctttttgtggaatttgcaagtggagatttcagccgctttgaagtcaaaggtagaaaaggaaatatcttcctataaaaactagacagaatgattctcagaaactcctttgtgatgtgtgcgttcaactcacagagttcaacctttcttttcatagagcagttgggaaacactctgtttgtaaactctgcaagtggatattcagacttctttgaggccttcgttggaagcgggatttcttcatattctgctagacagaagaattctcagtaactttccttgtgttgtgtgtattcaactcacagagttgaacgatcctttacacagagcagacttgaaacactctttttgtggaatttgcaagtggagatttcaagcgctttggggccaaaggcagaaaaggaaatatcttcgtataaaaactagacagaatcattctcagaaactgctctgcgatgtgtgcgttcaactctcagagtttaacgtttcttttcattcagcagtttggaaacactctgtttgtaaagtctgcacgtggatattttgaccacttagaggccttcgttggaaacgggtttttttcctgtaaggctagacagaagaattcccagtaacttccttgtgttgtgtacattcaactcacagagttgaacgttcccttagacagagcagatttgaaacacactttttgtgcaattggcaagtggagatttcaagcgctttaaggtcaatggcataaaaggaaatatcttcgtttcaaaactagacagaatcattcccacaaactgcgttgtgatgtgttcgttcaactcacagagtttaacctttcttttcatagagcagttaggaaacagtctgtttgtcaattctgtaagtggatattctgacatcttgtgaccttcgttggaaacgggatttcttcatattctgctagacagaagaattctcagtaacttccttgtgttgtgtgtattcaactcacagagttgaacgatcctttacacagagcagacttgaaacactctttttgtggaatttgcaagtggagatttcagccgctttgaggtcaatagtagaaaagtaaatatcttcgtagaaaaactagacagaatgattctcagaaactcctttgtgatgtgtgcgttcaactcacagagtttaacctttctgttcatagagcagttaggaaacactctgtttgtaaagtctgcaagtggatattcagacctctttgaggccttcgttggaaacgggaattcttcatattctgctagacagaagaattctctgtaacttccttgtgttgtgtgtattcaactgacagagttgaactttcatttagagagagcagatttgaaacactgtttttgtggaatttgcaagtggagatttcaagcgctttggggccaaaggcagaaaaggaaataacttcgtataaaaacttgacagaatgattctcagaaactcctttgtgatgtgtgtgttcaactcacagagtttaacctttcttttcatagagcagttaggaaacactctgtttgtaaggtctgcaagaggatattcagacctctttgaggccttcgttggaaacgggtttttttcatataaggctagacagaagaattcccagtaacttccttgtgttgtgtgtgttcaactcacagcagttgaactttcatttacacagagcagatttgaaacactctttttgtggaatttgcaaatggagatttcaagcgctttgaggccaaaggcagaaaaggaaatatcttcgtttcaaaactagacagaatcattctcagaaactgctctgcgatgtgtgcgttcaactctcagagtttaacttttcttgtcattcagcagtttggaaacactctttttgtaaagtctgcacgtggatattttgaccacttagaggccttcgttggaaacgggtttttttcatgtaaggctagacagaagaattctcagtaacttccttgtgttgtgtgtattcaactcacagagttgaacgatcctttacacagagcagacttgaaacactctttttgtggaatttgcaactggagatttcagccgctttgaggtcaaaggtagaaaaggaaactatcttcgtagaaaaattagacagaatgattctcagaaacttctttgtgatgtgtgcgttcaactcacagagtttaacctttcttttcatagagcagttaggaaacactctgtttgtaaagtctgcaagtggatattcagacctctttgaggccttcgttggaaacgggatttcttcatactatgctagacacaagaattcccagtaacttccttgtgttgtgtgtgttcaactcacagagttgaactttcatttacacagagcagatttgaaacactctttttgtggaaattgcaaatggagatttcaagcgctttgaggccaaaggcagaaaaggaaatatcttcgtataaaaactagacagaatcattctctgaaactgctctgcgatgtgtgccttcagcgctcagagtttaacttttcttttcattcagcagtttggaaacactctgtttctaaagtctgcacgtggatattttgaccacttagaggccttcgttggaaacgggtttttgtcatgtaaggctagacagaagaattcccagtaactcccttgtgttgtgtacattcaactcacagagttgaacgttcccttagacagagcagatttgaaacactctttttgtgcaattggcaagtggagatttcaagcgcttaaggtcaatggcagaaaaggaaatatttccgtttcaaaactagacagaaatgattctcagaaactcctttgtgatgtgtgtgttcaactcacagagtttaacctttcttttcatagagcagttaggaaacactctgtttgtaaagtctgcaagtggatattcagacctccttgaggccttcgttggaaacgggatttcttcatattctgctagacagaagaattctcagtaacttccttgtgttgtgtgtattcaactcacagagttgaacgatcctttacacagagcagacttggaacactctttttgtggaattttcaagtggagatttcagccgcgttgaggtcaatggtagaaaaggaaatatcttcgtataaaaactagacagaacgattctcagaaactcctttgtgatgtgtgcgttcaactcacagactttaacctttcttttcatagagcagttaggaaacactctgtttgtaaagtctgcaagtggatattcagacctctttgaggccttcgttggaaacgggatttcttcatattctgctagacagaagaattcctcagtaactttcttgtgttgtgtgtattcaactgacagagttgaactttcatttagagagaccagatttgaaacactgtttttgtggaatttgcaagtggagatttcaagcgctttggggccaaaggcagaaaaggaaatatcttcgtataaaaactagacagaatcattctcagaaactgctgcgtgatgtgtgcgttcaactctcagagtttaacttttcttttcattcagcggtttggaaacactctgtttgtaaagtctgtacgtggatattttgaccacttagaggccttcgttgcaaacgggttttttgcatgtaaggctagacagaagaattcccagtaacttccttgtgttgtgtgcattcaactcacagagttgaacgttcccttagacagagcagatttgaaacactctatttgtgcaatttgcaagtgtagatttcaagcgctttaaggtcaatggcagaaaaggaaatttcttcgttttaaaactagacagaatcattcccacaaactgcgttgtgatgtgttcgttcaactcacagagtttaacctttcttttcatagagaagttaggaaacactctgtttgtaaagtctgcaagtggatattcagacctccttgaggccttcgttggaaacgggatttcttcatattctgctagacagaagaattctcagaatcttccttgtgttgtgtgtattcaactcacagagttgaacgatggtttacacagagcagatttgaaacactcatttggtggaatttgcaagtggagatttcagccgcattgaggtcaatggtagaaaaggaaatatcttcgtataacaactagacagaatgattctcataaactcctttgtgatgtgtgcgttcaactcacagagtttaacctttcttttcatagagcagttaggaaacactctgtttgaaaagtctgcaagtggatattcagaccaccttgaggccttcgttggaaacgggatttcttcatattctgctagacagaagaattctctgtaacttccttgtgttgtgtgtattcaactgacagagttgaactttcatttagagagagcaggtttgaaacactgtttttgtggaatttgcaagtggagatttcaagcgctttggggcaaaaggcagaaaaggaaatatcttcgtataaaaactagacagaatcattctcagaaactgcgctgcgatgtgtgcgttgaactctcagagtttaacttttcttttcattcagcagtttggaaacactctgtttgtaaagtctgcacgtggatattttgaccacttagagtccttcgttggaaacgggtttttttcctgtaaggctagacagaagaattcccaggaacttccttgtgttgtgtacattcaactcacagagttgaacgttcccttagacagagcagatttgaaacactctttttgtgcaattggcaagtggtgatttcagccgctttgaggtcaatggtaaaaaaggaaataacttcctataaaaactagacagaatcattaccacaaactgcgttgtgatgtgttcgttcaactcacagagtttaacctttctgttcatagagcagttaggaaacactctgtttgtaaagtctgtaagtggatattctgacatcttgtggccttcgttggaaacgggatttcttcatattctgctagacagaagaattctcagtaacttccttgtgttgtgtgtattcaactcacagagttgaacgatcctttacacagagcagacttcaaacactctttttgtggaatttgcaagtggagatttcagccgctttgaggtcaatggtagaataggaaatatcttcctatagaaactagacagaatgattctgagaaactcctttgtgatgtgtgcattcaactcacagagtttaacctttcttttcatagagcagttaggaaacactctgtttgtaaagtctgcaagtggatattcagacctccttgaggccttcgttggaaacgggatttcttcatattatgctagacagaagaattttcagtaacttccttgtgttgtgtgtattcaactcacagagttgaacgatcctttacacagagcagacttgaaacactctttttgtggaatttgcaagtggagatttcagccgctttgagttcaatggtagaataggaaatatcttcctatagaaactagacagaatcattctcagaaactgctctgcgatgtgtgcgttcaactctcagagtttaacttttcttttcattcagcagtttggaaacactctgttttttaaagtctgcacgtggatattttgaccacttagaggccttcgttggaaacgggtttttttcctgtaaggctagacagaagaattcccaataacttccttgtgttgtgtacattcaactcacagagttgaacgttcccttagacagagcagatttgaaacactctttttgtgcaattggcaagtggagatttcaagcgctttaaggtcaatggcagaaaaggaaatatcttcgtttcaaaactagacagaatgattctcagaaactcctttgtgatgtgtgcactcaactcacagagtttagcctttcttttcatagagcagttaggaaacactctgtttgtaaagtctgcaagtggatattcagacctctttgaggccttcgtaggaaatgggatttcttcatattatgctagacagaagaattctcagtaacttccttgtgttgtgtgtattcaactcacagagttgaacgatcctttacacagagcagacttgaaacactctttttctggaatttgcaagtggagatttcagcctctttgaggtcaatggtagaaaaggaaatatcttcgtataaaaactagacagaatgattctcagaaactcctttgtgatgtgtgcgtgcaactcacagagtttaacctttcttttcatagagcagttaggaaacactctgtttgtaaagtctgcaagtggatattcagacatctttgaggctttcgttggaaacgggattttttcatattctgctaggcagaagaattctcagtaacttccttgtgttgtgtgtattcaactgacagagttgaactttcatttggagagagcagatttgaaacactgtttttgtggaatttgcaagtggagatttcaagcgctttggggccaaaggcagaaaaggaaatatcttcgtataaaaactagaaagaatcattctcagaaactgctctgcgatgtgtgcgttcaactctcagagtttaacttttcttttcattcagcagtttggaaacactctgtttggaaagtctgcacgtggatattttgaccacttagaggccttcgttggaaacgggtttttttcctgtaaggctagacagaagaattcccagtaacttccttgtgttgtgtgtgttcaactcacagagttgaactttcatttacacagagcagatttgaaacactctttttgtgcaattggcaagtggagatttcaagcgctttaaggtcaatggcagaaaaggaaatatcttcgtttcaaaactagacagaatgattctcagaaacttctttgtgatgtgtgcgttcaactcacagagtttaacctttcttttcatagaggagttaggaaacactctgtttgtaaagtctgcaagtggatattcagacctctttgaggccatcgttggaaacgggatttcttcatactatgctagacagaagaattctcagtaacttccttgtgttgtgtgtattcaactcacagagttgaacgatcctttacacagagcagacttgtaacactctttttgtggaatttgcaagtggagatttcagccgcgttgaggtcaatggtagaaaaggaaatatcttcgtataaaaactagacagaatgattctcagaaactcctttgtgatgtgtgcgttcaactcacagagtttaacctttcttttcatagagcagttaggaaacactccgtttctaaagtctgcaagtggatattcagacctctttgaggccttcgttggaaacgggtttttttcatataaggctagagagaagaattcccagtaacttccttgtgttgtgtgtgttcaactcacagagttgaactttcatttacacagagcagatttgaaatactctttttgtggaatttgcaagtggagatttcaagcgctttgaggccaaaggccgaaaaggaaatatcttcgtataaaaactagacagaatgattctcagaaatttctttgtgatgtgtgcgttcaactcacagagtttaacttttcttttcattcagcagtttggaaacactctgtttgtaaagtctgcaagtggatattcagacctctttgaggccttccttggaaacgggttttttttcatgtaaggctagacagaagaattcccagtaacttccttgtgttgtgtacattcaactcacagagttgaacgttcccttagacaaagcagatttgaaacactctttttgtgcaattggcaagtggagatttcaagcgctttaaggtcaatggcagaaaaggaaatatcttcgtttcaaaactagacagaatgattctcagaacctcctttgtgatgtgtgcgttcaactcacagagttgaacctttcttttcatagagcagttaggaaacactctgtttgtaaagtctgcaagtggatattcagacatccttgaggctttcgttggaaacgggatttcttcatattctgctagaaagaagaattctcagtaacttctttgtgttgtgtttattcaactcacagagttgaacgatactttacacagagcagacttgatacactcgttttgtggaatttgcaagtggagatttcagccgctttgaggtccatggtagaaaaggaaatatcttcgtataaaaacttgacagaatgattctcagaaactcctttgtgatgtgtgcgttcaactcacagagtttaacctttcttttcatagagcagttaggaaacactctgtttgtaaagtctgcaagtggatattcggacctccttgaggccttctttggaaacgggatttcttcttattatgctagacagaagaattctcagtaacttccttgtgttgtgtgtattcaactcacagagttgaactttcatttagagagagcagatttgaaacacagtttttgtggaatttgcaagtggagatttcaagcgctttggggccaaaggcagaaaaggaaatatcttcgtataaaaactagacagaatcatactcagaaactgctgcgtgatgtgtgcgttgaactctcagagtttaacttttcttttcattcagcggtttggaaacactctgtttgtaaagtctgcacgtggatattttgaccacttagaggccttcgttggaaacgggtttttttcatgtaaggctagacagaagaattcccagtaacttccttgtgttgtgtacattcaactcacagagttgaacgttcccttagacagagcagatttgaaatactctttttgtgcaattggcaagtggagatttcaagcgctttaaggtcaatggcagaaaaggaaatatcttcgtttcaaaactagacagaatcattcccaaaaactgcgttgtgatgtgttcgttcatctcacagagtttaacctttcttttcatagagcagttaggaaacactctgtttgtaaattctgtaagtggatattctgacatcttgtggccttcgttggaaacgggatttcttcatattctgctagacagaaaaattctcagtaacttccttgtgttgtgtgtattcaactcacagagttgaacgatcctttacacagagcagacttgaaacactctttttgtggaatttgcaagtggagatttcagccgctttgaggtcaatggtagaaaaggaaatatcttcctatagaaactggacagaaagattctcagaaactcctttgtgatgtgtgcgttcaactcacagagtttaacctttcttttcatagagcagttaggaaacactctgtttgtaaagtctgcaagttcatattcagacctctttgaggccttcgttggaaacgggtttttttcatataaggctagagagaagaattcccagtaacttccttgtgttgtgtgtgttcaactcacagagttgaactttcatttacacagagcagatttgaaacactctttttgtggaatttgcaaatggagatttcagccgcgttgaggtcaacggtagaaaaggatatatcttcgtttcaaaactagacagaatcattctcagaaactgctctgcgatgtgtgcgttgaactctcagagtttaacttttcttttcattcagcagtttggaaacactctgtttgtaaagtctgcacgtggatattttgaccacttagaggcctttgttggaaacgggtttttttcctggaaggctagacagaagaattcccagtaactttccttgtgttgtgtgcattcaactcacagagttgaacgttcccttagacagagcagatttgaaacactctatttgtgcaattggcaagtgtagatttcaagcgctttaaggtcaatggcagaaaaggaaatatcttcgtttcaaaactagacagaatgattctcagaaactcctttgtgatgtgtgccttcaactcacagagtttaacttttcttttcatagagcagttaggaaacactctgtttctaaagtctgcaagtggatattcagacctctttgaggccttcgttggaaacgggatttcttcatattctgctagacagaagaattctcagtaacttccgtgtgttgcgtgtattcaactcacagagttgaacgatcctttacacagagcagacttgaaacactctttttgtggaatttgcaagtggagatttcagccgctttgaggtcaaagttagaaaggaaatatcttcctataaaaactagacagaatgattctcagaaactcctttgtgatgtgtgcgttcaactcacagagttcaacctttcttttaatagagcagttgggaaacactctgtttgtaaagtctgcaagtggatattcagacttctttgaggccttcgttggaagcgggctttcttcatattctgctagacagaagaattcccagtaacttccatgtgttgtgtgtgttcaactcacagagttgaacgttcccttagacagagcagatttgaaacactctttttgtggaatttgcaagtggagatttcaagcgctttgaggccaaaggcagaaaaggaaatatcttcgtataaaaactagacagaatcattctcagaaactgctgcgtgatgtgtgcgttcaagtctcagagtttaacttttcttttcattcagcggtttggaaacactctgtttgtaaagactgcacgtggatattttgaccacttagaggccttcgttggaaacgggttttttttcatgtaaggctagacagaagaattcccaggaacttccttgtgttgtgtacattcaactcacagagttgaacgttcccttagacagagcagatttgaaacactctttttgtgcaattggcaagtggtgatttcagccgctttgacgtcaatggtagaaaaggaaatatcttcgtataaaaactagacagaatcattcccacaaactgcgttgtgatgtgttcgttcaactcacagagtttaacctttcttttcatagagcacttaggaaacagtctgtttgtaaattctgtaagtggatattctgacatcttgtggccttcgttggaaacgggatttcttcatattctgctagacagaataattctcagtaagttccttgttttgtgtgtattcaactcacagagttgaaggatcctttagagagagcaggcttgaaacactctttttgtcgaaattgcaagtggagatttcagccgctttgaggtcaatggtagaataggaaatatcttcctatagaaactagacagaatgattctcagaaactcctttgtgatgtgtgtgttcaactcacagagtttaacctttcttttcatagagcagttaggaaacactctgtttgtaaagtctgcaagtggatattcagacctctttgaggccttctttggaaacgggatttttcatataaggctagacagaagaattcccagtaacttccttgtgttgtgtgtgttcaactcacagagttgaactttcatttacacagagcagatttgaaacactctttttgtggaatttgcaggtggagatttcaagcgctttgaggccaaaggcagaaaaggaaatatacttcgtataaaaactagacagaatcattctcagaaactgctctgcgatgtgtgcgttcaactctcagagtttaacttttcttttcattcagcagtttggaaacactctgtttgtaaagtctgcacgtggataatttgaccacttagaggccttcgttggaaacgggtttttttcatgtaaggatagacagaagaattcccagtaacttcccttgtgttgtgtgcattcaactcacagagttgaacgttcccttagacagagcagatttgaaacactctatttgtgcaatttgcaagtgtagatttcaagcgctttaaggtcaatggtagaaaaggaaatatcttcgttttaaaactagacagaatcactcccacaaactgcgttgtgatgtgttcgttcaactcacagagtttaacctttcttttcatagagcagttaggaaacagtctgtttgaaaattctgtaagtggatattctgacatcttgtggccttcgttggaaacgggatttcttcatattctgctagacagaagaattctcagaatcttccttgtgttgtgtgtattcaactcacagagttgaacgatcctttacacagagcagatttgaaacactctttttgtggaatttgcaagtggagatttcagccgctttgaggtcaatggtagaaaaggaaatatcttcctataaaaactagacagaatgattctcagaaactcgtttgtgatgtgtgcgttcaactcacagagattaacttttcttttcatagagcagttaggaaacactctgtttgtaaagtctgcaagtggatattcagacctctttgtggccttcgttggaaacgggatttcttcatattatgctagacagaagaattctcagtaacttccttgtgttgtgtgtattcaactgacagagttgaactttcatttagagagagcagatttgaaacactgtttttgtggaatttgcaagtggagatttcaagcgctttggggccaaaggcagaaaaggaaatatcttcgtataaaaagtagacagaatcattctcagaaactgctgcgtgatgtgtgcgttcaactctcagagtttaacttttcttttcattcagcagtttggaaacactctgtttgtaaagtctgcacgtggaaattttgaccacttagaggccttcgttggaaacgggtttttttcatgtaaggctagacagaagaattcccagtaacttccttgtgttatgtgcattcaactcacagagttgaacgttcccttagacagagcagatttgaaacactctatttgtgcaatttgcaagtgtagatttcaagcgctttaaggtcaatggcagaaaaggaaatatcttcgtttcaaaactagacagaatcattcccacaaactgcgttgtgatgtgttcgttcaactcacagagtttaacctttcttttcatagagcagttaggaaacagtctgtttgtaaattctgtaagtggatattctgatatcttgtggccttcgttggaaacgggatttcttcatattctgctagacagaagaattctcagtaacttctttgtgttgtgtgtattcaactcacagagttgagcgatcctttacacagagcagacttgaaacactcgttttgtggaatttgcaagtggagatttcagccgctttgaggtcaatggtagaaaaggaaatatcttcgtataaaaactagacagaatgattctcagaaactcctttgtgatgtgtgcgttcaactcacagagtttaacctttcttttcatagagcagttaagaaacactctgtttgtaaagtctgcaagtggatattcagacctctttgaggccttcgttggaaacgggatttcttcatattctgctagacagaagaattcccagtaacttcccttgtgttgtgtgtgttcaactcacagagttgaactttcatttacacagagcagatttgaaacactctttttgtggaatttgcaagtggagatttcaagcgctttcaggccaaaggcagaaaaggaaatatcttcgtataaaaactaggcagaatcattctcagaaactgctctgcgatgtgtgcgttcaactctcagagtttaacttttcttttcattcagcagtttggaaacacactgtttgtaaagtctgcacgtggatattttgaccacttagaggccttcgttggaaacgggtttttttcctgtaaggctagacagaagaattcccagtaacttccttgtgttgtgtacattcaactcacagagttgaacgttcccttagacagagcagatttgaaacactctttttgtgcaattggcaagtggagatttcaagcgctttgaggtcaatggcagaaaaggaaatatcttcgtttcaaaactagacagaatgattctcagaaactcctttgtgatgtgtgcgttcaactcacagagtttaagttttcttttcatagagcagttaggaaacactctgtttgtaaagtctgcaggtggatattcagacctctttgaggccttcgttggaaaagggatttcttcatattatgctagacagaataattctcagtaacttccttgtgttgtgtgtattcaactcagagttgtacgatcctttacagagagcagacttgaaacactctttttgtggaatttgcaagtggagatttcagccgctttgaggtcaatggtagaactaggaaatatcttcctatagaaactagacagaatgattctcagaaactcctttgtgatgtgtgtgttcaactcacagagtttaacctttcttttcatagagcagttagtaaacactctgtttataaagtctgcaagtggatattcagagccctttgtggccttcgttggaaacggggtttcttcatattatgctagacagaagaattcccagtaacttccttgtgttgtgtgtgttcaactcacagagttgaactttcatttacacagagcagatttgaaacactctttttgtggaatttgcaagtggagatttcaagcgctttaaggccaaaggcagaaaaggaaatatcttcgtttcaaaactagacagaatcattctcagaaactgctgcgtgatgtgtgcgttcaactctcagagtttaacttttcttttcattcagcggtttggaaacactctgtttgtaaagtctgcaagtggatattcagacctctttgaggccttcgttggaaacgggatttcttcatattatgctagacagaagaattcccagtaacttccttgtgttgtgtacattcaactcacagagttgaacgttcccttagacagagcagatttgaaacactttttttgtgcaattggcaagtggtgatttcaaccgctttgaggtcaatggtagaaaaggaaatatcttcgtataaaaactagacagaatcattcccacaaactgcgttgtgatgtgttcgttcaactcacagagtttaacctttctgttcatagagcagttaggaaacactctgtttgtaaagtctgcaagtggatattcagacctccttgaggctttcgttggaaacgggatttgttcatattctgctagacagaagaattctcagtaacttccttgtgttgtgtgtattcaactcacagagttgaacgatcctttacacagagcagacttgaaacactctttttctggaatttgcaagtggagatttcagccgctttgaggtcaatggtagaaaaggaaatatcttcgtataaaaactagacagaatgattctcagaaactcctttgtgatgtgtgcgttcaactcacagagtttaacctttcttttcatagagcagttaggaaacactctgtttgtaaagtctgcaagtggatattcagacctctttgaggccttcgttagaaacgggatttcttcatattatgctagacagaagaattctcagtaacttccttgtgttgtgtgtattcaactgacagtgttgaactttcatttagagagagcagatttgaaacactgtttttgtggaatttgcaagtggagatttcaagcgctttggggccaaaggcagaaaaggaaatatcttcgtataaaaactagacagaatcattctcagaaactgctgcgtgatgtgtgcgttcaactctcagagtttaacttttcttttcattcagcggtttggaaacactctgttcgtaaagtctgcacgtggatattttgaccacttagaggccttcgttggaaacgggtttttttcatgttaggctagacagaagaattcccagtaacttccttgtgttgtgtacattcaactcacagaggtgaacgttcccttagacagagcagatttgaaacactctttttgtgcaattggcaagtggagatttcaagcgctttaaggtcaatggcagaaaaggaaatatcttcgtttcaaaactagacagaatgattctcagaaactcctttgtgatgtgtgcattcaactcacagagtttaacctttcttttcatagagcagttaggaaacactctgtttgtaaagtctgcaagtggatattcagacctccttgaggccttcgttggaaacgggatttcttcatattctgctatacagaagaattctcagaaacttccttgtgttgtgtgtattcaactcacagagttgaacgatcgtttacacagagcagacttgagacactctttttgtggaatttgtaagtggagatttcagccgctttgaggtcaatggtagaaagggaaatatcttcatataaaaactagacagaatgattctcagaacctcctttgtgatgtgtgcgttcaactcacagagtttaacctttcttttcatagagcagttaggaaacactctgtttgtaaagtctgcaagtggatattcagacctctttgaggccttcgttggaaacgggatttcttcatattatgctagacagaagaattctcagtaacttccttgtgttgtgtgtattcaactcacagagttgaactttcatttacacagagcagatttgaaacactctttttgtggaatttgcaagtggagatttcaagcgctttgaggccaaaggcagaaaaggaaatatcttcgtttcaaaactagacagaatcattctcagaaactgctctgcgatgtgtgcgttcaactctcagagtttaacttttcttttcattcagcagtttggaaacactctgtttgtaaagtctgcacgtggataacttgaccacttagaggccttcgttggaaacgggtttttttcctgtaaggctagacagaagaattcccaggaacttccttgtgttgtgtacattcaactcacagagttgaacgttcccttagacagagcagatttgaaacactctttttgtgcaattggcaagtggtgatttcagccgctttgaggtcaatggtagaaaaggaaatatcttcgtttcaaaaccagacagaatgattctcagaaactcctttgtgatgtgtgcgttcaactcacagagtttaacctttcttttcatagagcagttaggaaacactctatttgtaaagtctgcaagtggatattcagacatccttgagtctttctttggaaacgggatttcttcatattctgctagaaagaataattctcagtaacttccttgtgttgtgtgtattcaactcacagagttgaacgatcctttacacagagcagacttgaaacactctttttgtggaatttgcaattggagatttcagccgctttgaggtcaatggtagaataggaaatatcttcctatagaaactagacagaatgattctcagaaactcctttctgatgtgtgtgttcaactcacagagtttaaactttcttttcatagagcagttaggaaacactctgtttataaagtctgcaagtggatattcagacccctttgtggccttcgttggaaacgggatttcttcatattatgctagacagaagaattctcagtaacttccttgtgttgtgtgtattgaactcgcagagttgaacgatcctttacacagagcagacttgaaacactctttttgtggaatttgcaagtggagatttcagccgcattgaggtcaatagtagaaaaggaaatatcttcgtagaaaaactagacagaatcattctcagaaactgctctgcgatgtgtgcgttcaactctcagagtttaacttttcttttcattcagcagtttggaaacactctgtttgtaaagtctgcacgtggatattttgaccacttagaggccttcgttggaaacgggtttttttcctgtaaggctacacagaggaattcccagtaacttccttgtgttgtgtacattcaactcacagagttgaacgttcccttagacagagcagatttgaaacactctttttgtgcaattggcaaatggagatttcaagcgctttaagttcaatggcagaaaaggaaatatcttcgtttcaaaactagacagaatcattcccacaaactgcgttgtgatgtgttcgttcaaatcacagagtttaacctttctgttcatagagcagttaggaaacactctgtttgtaaagtctgtaagtggatattctgacatcttgtggccttcgttggaaacgggatttcttcatattctgctagacagaagaattctcagtaacttccttgtgttgtgtgtattcaactcacagagttgaacgatcctttacacagagcagacttgaaacactctttttgtggaatttgcaagtggagatttcagccgctttgaggtcaatggtagaataggaaatatcttcctatagaaaatagacagaatgattctcagaaactcttttatgatgtgtgcgttcaactcacagagtttaacttttcttttcatagagcagttaggaaacactctgtttgtaaactctgcaagtggatattcagacctctttgaggccttcgttgcaaacgggatttgttcatattatgcctgacagaagaattctcagtaacttccttgtgttgtgtgtattcaactcacagagttgaactttcattcacacagagcagatttgaaacacgctttttatggaatttgcaagtggagatttcaagcgctttgaggccaaaggcagaaaaggaaatatcttcgtttcaaaactagacagaatcattctcagaaactgctctgcgatgtgtgcgttcaactatcagagtttaacttttcttttcattcagcagtttggaaacactctgtttgtaaagcctgcacgtggataatttgaccacatagaggccttcgttggaaacgggtttttttcatgtaaggctagacagaagaattcccagtaacttccttgtgttgtgtgcattcaactcacagagttgaacgttcccttagacagagcagatttgaaacactctatttgtgcaatttgcaagtgtagatttcaagcgctttaaggtcaatggcagaaaaggaaatatcttcgtttcaaaactagacagaatgattctcagaaactcctttgtgatgtgtgcgttcaactcacagagttcaacctttcttttcctagagcagttgggaaacactctgtttgtaaagtctgcatgtggatattcagacatccttgaggctttcgttggaaacgggatttcttcatattctgctagaaagaagaattctcagtaacttccttgtgttgtgtgtattcaactcacagagttgaacgatcctttacagagagcagacttgacacactctttttgtggaatttgcaagtggagatttcagccgctttgtggtcaatggtagaataggaaatatcttcctatagaaactagacagaatgattctcagaaactcctttgtgatgtgtgcgttcaactcacagagtttaacctttcttttcatagagcagttaggaaactctctgtttgtaaagtctgcaagtggatattcagacatccttgaggctttcgttggaaacgggatttcttcatattctgctagaaagaagaattcccagtaacttccttgtgttgtgtgtgttcaactcacagagttgaactttcatttacacagagcagatttgaaacactctttttgtggaatttgcaagtggagatttcaagcgctttgaggccaaaggcagaaaagtaaatatcttcgtttcaaaactagacagaatcattctcagaaactgctgcgtgatgtgtgcgttcaactctcagagtttaacttttcatttcattcagcggtttggaaacactctgtttgtaaagtctgcacgtggaaattttgaccacttagaggccttcgttggaaacgggtttttttcatgtaaggctagacagaagaattcccagtaacttcccttgtgttgtgtacattcaactcacagagttgaacgttcccttagacagagcagatttgaaacactctttttgtgcaattggcaaatggagatttcaagcgctttaaggtcaatggcaggaaaggaaatatcttcgtttcaaaactagacagaatcattcccacaaactgcgttgtgatgtgttcgttcaactcacagagtttaacctttctgttcatagagcagttaggaaacactctctttgtaaagtctgtaagtggatattctgatatcttgtggccttcgttggaaacgggatttcttcatattatgctagacagaagaattctcagtaacttccttgtgttttgtgtattcaactcacagagttgaacgatcctttacacagagcagactagaaacattctttttgtggaatttgcaagtggagatttcagccgctttgaggtcaatcgtagaataggaaatatcttcctatagaaactagacagaacgattctcagaaactcctttgtgatgtgagcgttcaactcacagagtttaacctttcttttcttagagcagttaggaaacactctgtttgtaaagtctgcaagtggatattcagacctctttgaggccttcgttggaaacgggatttcttcatattctgctagacagaagaattctcagtaacttcccttgtgttgtgtgtattcaactgacagagttgaactttcatttagagagagcagatttgaaacactgtttttgtggaatttgcaagtggagatttcatgcgctttggggccaaaggcagaaaaggaaatatcttcgtataaaaactagacagaatcattctcagaaactgctctgcgatgtgtgcgttcaactctcagagtttaacttttcttttcattcagcagtttggaaacactctgtttgtaaagtctgcacgtggataacttgaccacttagaggccttcgttggaaacgggttttttttcctgtaaggctagacagaagaattcccaggaacttccttatgttgtgtacattcaactcagagagttgaacgttcccttagacagagcagatttgaaacactctttttgtgcaattggcaagtggtgatttcagccggtttgaggtcaatggtagaaaaggaaatatcttcgtataaaaactagacagaatcattcccacaaactgcgctgtgatgtgttcgttcaactcacagagtttaacctttcttttcatagagcagttaggaaacagtctgtttgtaaattctgtaagtggatattctgacatcttgtggccttcgttggaaacgggatttcttcatatgctgctagacagaagaattctcagtaacttccttttgttgtgtgtattcaactcacagagttgaacgatcctttacacagagcagacttgaaacactctttttgtggaatttgcaagtggagatttcagccgctttgaggtcaatcgtagaaaaggaaatatcttcgtagaaaaactagacagaatgattctcagaaactcctttgggatgtgtgcgttcaactcacagagtttaacctttcttttcatagagcagttaggaaacactctgtttgtaaagtctgcaagtggatattcagacctctttgaggccttcgttggaaacgggatttcttcatactgtgctagacagaagaattctcagtaacttccttgtgttgtgtgtattcaactcacagagttgaacgatcctttacacagagcggacttgaaacacactttttgtggaatttgcaagtggagatttcagccgcgttgaggtcaatggtagaaaagcaaatatcttcgtataaaaaatagacagaatcattctcagaaactgctctgcgatgtgtgcgttcaactctcagagtttaactttgcttttcattcagcagtttggaaacactctgtttgtaaactctgcacgtggataatttgaccacttagaggccttcgttggaaacgggtttttttcatgtaaggctagacagaagaattcccagtaacttccttgtgttgtgtacattcaactcacagagttgaacgttccctcagacagagcagatttgaaacactctttttgtgcaattggcaaatggagatttcaagcgctttaaggtcaatggcagaaaaggaaatatcttcgtttcaaaactagacagaatcattcccacaaactgcgttgtgatgtgttcgttcaactcacagagtttaacctttctgttcatagagcagttaggaaacagtctgtttgtcaattctgtaagtggatattctgacatcttgtggccttcgttggaaacgggatttcttcatattctgctagacagaagaattctcagaaacttcgttgtgttgtgtgttttcaactcacagagttcaacgatcctttacacagagtagacttgaaacactctttttgtggaattggcagggtggagatttcagccgctttgaggtcaatggtagaaaaggaaatatcttcgtataaaaactagacagaacgattctcagaaactccattgtgatgtgtgcgttcaactcacagagtttaacctttcttttcatagagcagttaggaaacactctgtttgtaaagtctgcaagtggatattcagacctccttgaggccttcgttggaaacgggatttcttcatattctgctagacagaagaattcccagtaacttccttgtgttgtgtgtgttcaactcacagtgttgaactttcatttacacagagcagatttgaaacactctttttgtggaatttgcaagtggagatttcaagcgctttgaggccaaaggcagaaaaggaaatatcttcgtttcaaaactagacagaatcattctcagaaactgctctgcgatgtgtgcgttcaactctcagagtttaacttttcttttcattcagcagtttggaaacactctgtttgtaaagtctgcacgtggatattttgaccacttagaggccttcgttggaaacgggtttttttcctgtaaggatagacagaagaattcccagtaacttccttgtgttgtgtgcattcaactcacagagttgaacgttcccttagacagagcagatttgaaacactctatttgttcaatttgcaagtgtagatttcaagcgctttaaggtcaatgacagaaaaggaaatatcttcgtttcaaaactagacagaatcattcccacaaactgcgttgtgatgtgttcgttcaactcacagagtttaacctttctgttcatagagcagttaggaaacactctgtttgtaaagtctgcaagtggatattcagacctccttgaggccttcgttggaaaagggatttcttcatattctgctagacagaagaattctcagaaacttccttgtgttgtgtgttttcaactcacagagttgaacgatcctttacacagagcagacttgaaacactccttttgtggaatttgcaagtggagatttcagccgctttgaggtcagtggtagattaggaaatatcttcctatagaaactagacagaatgattctcagaaactcctttgtgatgtgagcgttcaactcacagagtttaacctttcttttcatagagcagttaggaaacactctgtttgtaaagtctgcaagtggatattcagacatccttgaggctttcgttggaaacgggatttcttcatattctgctagaaagaagaattctcagtaacttccttgtgttgtgtgtattcaactgacagagttgagctttcatttggagagagcagatttgaaacactgtttttgtggaatttgcaagtggagatttcaagcgctttggggccaaaggcagaaaaggaaatatcttcgtataaaaactagacagaatcattctcagaaactgctctgcgatgtgtgcgttcaactctcagagtttaacttttcttttcattcagcagtttggaaacactctgtttgtaaagtctgcacgtggatattttgaccacttagaggccttcgttggaaacgggtttctttcctgtaaggctagacagaagaattcccagtaacttccttgtgttgtgtacattcaactcacagagttgaacgttcccttagacagagcagatttgaaacactctttttgtgcaattggcaagtggagatttcaagcgctttgaggccaaaggcagaaaaggaaatatcttcgtataaaaactagacagaatcattcccacaaactgcgttgtgatgtgttcgttcaactcacagagtttaacctttccgttcatagagcagttaggaaacactctgtttgtaaagtctgtaagtggatattctgacatcttgtggccttcgttggaaacgggatttcttcatattatgctagacagaagaattctcagtaacttccttgtgttgtgtgtattcaactcacagagttgaacgattctttacacagagcagacttgaaacactctttttgtggaatttgcaagtggagatttcagccactttgaggtcaatagtagaaaaggaaatatcttcgtagaaaaactagacagaatgattctcagaaactcctttgtgatgtgtgcgttcaactcacagagtttaacctttcttttcatagagcagttaggaaacactctgtttgtaaagtctgcaagtggatattcagtcctccttgaggccttcgttggaaacgggtttttttcatataagtctagacagaagaattctcagtaatttccttgtgttgtgtgtattcaactgacagagttgaactttcatttagagagagcagatttgaaacactgtttttgtggtatttgcaagtggagatttcaagcgctttggggccaaaggcagaaaaggaaatatcttcgtataaaaactagacagaatcattctcagaaactgctctgcgatgtgtgcgttcaactctcagagtttaacttttcttttcattcagcagtttggaaacactctgtttgtaaagtctgcacgtgcataatttgaccacttagaggccttcgttggaaacgggtttttttcatgtaaggctagacagaagaattctcagtaacttccttgtgttgtgtgtattcaactcacagagttgaacgatcctttacacagagcagacttgaaacactctttttgtggaatttgcaggtggagatttcagccgctttgaggtcaatggtagaataggaaatatcttcctatagaaactagacagaatgattctcagaaactcctttgtgatgtgtgcgttcaactcacagagtttaaccttccaattcatagagcagttaggaaacactctgtttgtaaagtctgcaagtggatattcagacctctttgaggccttctttggaaacgggatttcttcattttctgctagacagaagaattctcagtaacttctttgtgttgtgtgtattcaactcacagagttgaacgatcctttacacagagcagacttgaaacactctttttgtggaatttcaagtggagatttcagccgctttgaggtcaatggtagaataggaaatatcttcctatagaaactagacagaatgattctcagaaaatcttttgtgatgtgtgctttcaactcacagagtttaacttttcttctcatagagcagttaggaaacactctgtttgtaaagtctgcaagtggatattcagacctgtttgaggccttcgttggaaacgggatttcttcatattatgctagacagaagaattctcagtaacttccttgtgttgtgtgtattcagctgacagagttgaactttcatttagagagagcagatttgaaacactgtttttgtggaatttgcaattggagatttcaagcgctttggggccaaaggcagaaaaggaaatatcttcgtataaaaactagacagaatcattctcagaaactgctgcgtgatgtgtgcgttcaactctcagagtttaacttttcttttcattcagcggtttggagacactctgtttgtaaagtctgcaagtggatattttgaccacttagaggccttcgttggaaacgggtttttttcatgtaaggctagacagaagagttctcagtaacttccttgtgttgtgtgtattcaactcacacagttgaacgatcctttacagagagcggacttgtaacactctttttgtggaatttgcaagtggagatttcagccgctttgaagtcaaaggtagaaaagggaatatcttcctataaaaactagacagaatcattcccagaaactgcgttgcgatgtgttcgttcaactcacagagtttaacctttcttttcatagagcacttaggaaacagtctgtttgtaaattctgtaagtggatattctgacatcttgtggccttcgttggaaacgggatttcttcatattctgctagacagaagaattctcagtaacttccttgtgttgtgtgtatgcatctcacagagttgaacgatcctttacacagagcagacttgaaacactctttttgtggaatttgcaagtggagatttcagccgctttgaggtcaatggtagaaaaggaaatatcttcctataaaaactagacagaatgattctcagaaactcctttgtgatgtgtgtgttcaactcgcagagtttaacctttcttttcatagagcagttagtaaacactctgtttataaagtctgcaagtggatattcagacccctttgaggccttcgttggaaacgggatttcttcatattatgctagacagaagaattctcagaatcttccttgtgttgtgtgtattcaactcacagagttgaacgatggtttacacagagcagatttgaaacacactttttgtggaatttgcaagtggagatttcaagcgctttgaggccaaaggcagaaaaggaaatatcttcgtataaaaactagacagaatcactctcagaaactgctctgcgatgtgtgcgttcaactctcagagtttaacttttcttttcattcagcagtttggaaacactctgtttgtaaagtctgcacgtggatattttgaccaatcagaggccttcgttggaaacgggtttttttcctgtaaggctagacagaagaattctcagtaacttccttgtgttgtgtgtattcaactgacagagttgaactttcatttagagagaggagatttgaaacactgtttttgtggaatttgcaagtggagatttcaagcgctttaaggtcaatggcagaaaaggaaatatcttcgtttcaaaactagacagaatcattcccacaaactgcgttgtgatgtgttccttcaactcacagagtttaagctttctgttcatagagcagttaggaaacactctgtttgtaaagtctgtaagtggatattctgacatcttgtggccttcgttggaaacgggatttcttcatattatgctagacagaagaattctcagtaacttccttgtgttgtgtgtattcaactcacagagttgaacgatcctttacacagagcagacttgtaacactctttttgtggaatttgcaagtggagatttcaggggctttgaagtcaaaggtacaaaaggaaatatcttcctataaaaactagacagaatgattctcagaaactcctttgtgatgtgtgcgttcaactcacagagtttaacctttcttttcatagagcagttaggaaacactctgtttgtaaagtctgcaagtggatattcagacctctttgaggccttcgttggaaacgggttttttacatataacgctaaacagaagaattcccagtaacttccttgtgttgtgtgtgttcaactcacagagttgaactttcatttacacagagcagatttgaaacactctttttgtggaatttgcaagtttagatttcaagcgctttgaggccaaaggcagaaaaggaaatatcttcgtataaaaactagacagaatcattctcagaaactgctctgcgatgtgtgcgttcaactctcagagttcaacttttcttttcattcagcagtttggaaacactctgtttgtaaagtctgcacgtggataatttgactacttagaggccttcgttggaaacgggtttttttcatgtaaggctacacagaagaattcccagtaacttccttgtgttgtgtacattcaactcacagagttgaacgttcccttagacagagcagatttgaaacactctttttgtgcaattggcaaatggagatttcaagcgctttaagttcaatggcagaaaaggaaatatcttcgtttcaaaactagacagaatcattcccacaaactgcgttgtgatgtgttcgttcaactcacagagtttaacctttcttttcatagagcagttaggaaacagtctgtcaattctgtaagtggatattctgacctctagtggccttcgttggaaacgggatttcttcatattctgctagacagaagaattctcagaatcttccttgtgttgtgtgtattcaactcacagagttgaacgatcctttacacagagcagacttgaaacactctttttgtggaatttgcaagtggagatttcagccgctttgaggtcaatggtagaaaaggaaatattttcgtataaaaactagacagaatgattctcataaactcctttgtgatgtgtgcgttcaactcacagagtttaacctttcttttcatagagcagttaggaaacactctgtttgtaaagtctgcaagtcgatattcagacctctttgaggccttcgttggaaacgggatttcttcatattctgctagacagaagaattctcagtaacttccttgtgttgtgtgtattcaactgacagagttgaactttcatttagagagagcagatttgaaacactgtttttgtggaatttgcaagtggagatttcatgcgctttcgggccaaaggcagaaaaggaaatatcttcgtataaaaactagacagaatcattctcagaaactgctctgcgatgtgtgcgttcaactctcagagtttaacttttcttttcattcagcagtttggaaacactctgtttgtaaagtctgcacgtggatattttgaccacttagaggccttcgttggaaacggtttttttcatgtaaggctagacagaagaattcccagtaacttccttgtgttgtgtgcattcaactcacagagttgaacgttcccttagacagagcagatttgaaacactctatttgtgcaatttgcaagtgtagatttcaagcgctttaaggtcaacggcagaaaaggaaataccttcgtttcaaaagtagacagaatcattcccacaaactgcgttgtgatgtgttcgttcaactcacagagtttaacctttcttttcatagagcagttaggaaacagtctgtttgtaaattctgtaagtggatattctgacatcttgtggccttcgttggaaacgggattttatcatattctgctagacagaagattctcagtaacttccttgtgttgtgtgtattcaactcacagagttgaacgatcctttacacagagcggacttgaaacaaactttttgtggaatttgcaagtggagatttcagccgcgttgaggtcaatggtagaaaaggaaatatcttcgtataaaaactagacagaatgattctcagaaactcctttgtgatgtgtgcgttcaactcacagagtttaacctttcttttcatagagcagttaggaaacactctgcttgtaaagtctgcaagtggatattcagccctctttgaggccatcgttggaaacgggtttttttcatataaggctagacagaagaattctcagtaacttccttgtgttgtgtgtattcaagtgacagagttgaactttcatttagagagagcagatttgaaacactgtttttgtggaatttgcaagtggagatttcaagcgctttggggccaaaggcagaaaaggaaatatcttcgtataaaaactagacagaatcattctcagaaactgctctgcgatgtgtgcgttcaactctcagagtttaacttttcattcagcagtttggaaacactctgtttgtaaagtctgcgcgtggataacttgaccatttagaggccttcgttggaaacgggtttttttcatgtaaggctagacagaagaattcccagtaacttccttgtgttgtgtgcattcaactcacagagttgaacgttcccttggacagagcagatttgaaacactctatttgtgcaatttgcaagtgtagatttcaagcgctttatggtcaatggcagaaaaggaaatatcttcgtttcaaaactagacagaatcattcccacaaactgcgttgtgatgtgttcgttcaactcacagagtttaacctttctgttcatagagcagttaggaaacgctctgtttgtaaagtctgtaagtggatattctgacatcttgtggccttcgttggaaacgggatttcttcatattctgctagacagaagaattctcagtaacttccttgtgttgtgtgtattcaactcacagagttgaacgatgctttacacagagcatacttgaaacactcttcttgtggaatttgcaagtggagatttcagccgctttgaggtcaatggtagaataggaaatatcttcctatagaaactagacagaatgattctcagaaacttctttgtgatgtgtgcgttcaactcacagagtttaacctttcttttcatagagcagttaggaaacactctgtttgtaaactctgcaagtggatattcagacctctttgaggccttcgttggaaacgggatttcttcatactatgctacacagaagaattcccagtaacttccttgtgttgtgtgtgttcaactcgcagagttgaactttcatttacacagagcagatttgaaacactctttttgtggaatttgcaaatggagatttcaagcgctttgaggccaaaggcagaaaaggaaatatcttcgtataaaaaccagacagaatcattctcagaaactactgcgtgatgtgtgcgttcaactctcagagtttaacttttcttttcattcagcggtttggaaacactttgtttgtaaagtctgcacgtggatattttgaccacctagaggccttcgttggaaacgggtttttttcatgtaaggctagacagaagaattcccagtaacttccttgtgttgtgtacattcaactcacagagttcaacgttcccttagacagagcagatttgaaacactctttttgtgcaattggcaagtggagatttcaagcgctttaaggtcaatggcagaaaaggaaatatcttcgtttcaaaactagacagaatcattcccacaaactgcgttgtgatgtgttcgttcaactcacagagtttaacctttcttttcatagagcagttaggaaacactctgttggtaaattctgtaagtggatattctgacatcttgtggccttcgttggaaacaggatttcttcatattctgctacacagaagaattctcagaaacttccttgtgttgtgtgtattcaactctcagagttgaacgaccctttacacagagcagacttgaaacactctttttgtggaatttgcaagtggagatttcagccgctttgaggtcaatggtagaaaaggaaatatcttcgtataaaaactagacagaatgattctcagaaactcctttgtgatgtgtgtgttcaactctgagagtttaacctttcttttcatagagcagttaggaaacactctgtttatagagtctgcaagtggatattcagacccctttgtggtcttctttggaaacggatttcttcatattatgctagacagaagaattctcagtaacttccttgtgttgtgtgtattcaactgacagagttgaactttcatttagagggagcagattagaaacactgtttttgtggaatttgcaagtgcagatttcaagcgctttgtggccaaaggcagaaaaggaaatatcttcgtatgaaaactagacagaatcattctcagaaactgctctgtgatgtgtgcgttcaactctcagagtttaacttttcttttcattcagcagtttggaaacactctgtttgtaaagtctgcacgtggataatttgaccacttagaggccttcgttggaaacgggtttttttcatgtaaggctagacagaagaattcccagtaacttccttgtgttgtgtgcattcaactcagagagttgaactttcctttagacagagcagatttgaaacactctatttgtgcaatttgcaagtgtagatttcaagcgctttaaggtcaatggcagaaaaggaaatatcttcgtttcaaaactagacagaatcattcccacaaactgcgttgtgatgtgttcgttcaactcacagagtttaacttttctgttcatagagcagttaggaaacactctgtttgtaaagtctacaagtggatattcagacctccttgaggccttcgttggaaacgggatttcttcatattctgctagaccgaagaattctcagaatcttccttgtgttgtgtgtattcaactcacacagttgaacgatggtttacacagagcagatttgaaacactctttttgtggaatttgcaagtggagatttcagccgcgttgaggtcaatggtagaaaaggaaatatcttcgtataaaaactagacagcatgattctcagaaactcctttgtgatgtgtgcgttcaattcacagagtttaacttttcttttcatagagcagttaggaaacactctgtttgtaaagtctgaaagtggatattcagacctctttgtggccttcgttggaaacgggatttcttcatattctgctagacagaagaattctcagtaacttccttgtgttgtgtgtattcaactcacagagttgaacgatcctttacacagagcagacttgaaacactctttttgtggaatttgcaagtggagatttcaagcgcttcggggccaaaggcagaaaaggaaatatcttcgtataaaaactagacagaatcattctcagaaactgctgcgtgatgtgtgcgttcaactctcagagtttaacttttcttttcattcagcggtttggaaacactctgtttgtaaagtctgcacgtggaaattttgaccacttagaggccttcgttggaaacgggattttttcatgtaaggctagacagaataattcccggtaacttccttgtgttgtgtacattcaacttacagagttgaacgttcccttggacagagcagatttgaaacactctttttgtgcaattggcaagtggagatttcaagcgcttaaggtcaatggcagaaaaggaaatatcttcgtttcaaaactagacagaatcattcccacaaactgcgttgtgatgtgttcgttcaactcacagagtttaacctttctgttcatagagcagttaggaaacactctgtttgtaaagtctgtaagtggatattctgatatcttgtggccttcgttggaaacgggatttcttcatattctgctagacagaagaattctcagaaacttccttgtgttgtgtgtattcaactcacagagttgaacgatcgtttacacagagcagacttgagaccctctttttgtggaatttgtaagtggagatttcagccgctttgaggtcaatggtagaaaaggaaatatcttcatataaaaactagacagaatgattctcagaaactcctttgtgatgtgtgtgttcaactcacagagtttaacctttcctttcatagagcagttagtaaacactctgtttataaagtctgcaagtggatattcagacccctttgaggccttcgttggaaacgggatttcttcatattatgctagacagaagaattcccagtaacttctttgtgttgtgtgtgttcaactcacagagttgaactttgatttacacagagcagatttgaaacactctttttgtggaatttgcaagtggagatttcaagcgctttgaggccaaaggcagaaaaggaaatatcttcgtataaaaactagacagaatcattctcagcaatctgctgcgtgatgtgtgcgttcaactctcagagtttaacttttcttttcattcagcggtttggaaacactctgtttgtaaagtctgcacgtggatattttgaccacttagaggccttcgttggaaacgggtttttttcatgtaaggctagacagaagaattcccagtaacttccttgtgttgtgtacattcaactcacagagttgaacgttcccttagacagagcagatttgaaacactctttttgtgcaattggcaagtggagatttcaagcgctttaaggtcaatggcagaaaaggaaatatcttcgtttcaaaactagacagaatcattcccacaaactgcgttgtgatgtgttcgttcatctcacagagtttaacctttcttttcatagagcagttaggaaacagtctgtttgtaaattctttaagtggatattctgacatcttgtggccttcgttggaaacgggatttcttcatattctgctagacagaaggattctcagtaacttccttgtgttgtgtgtattcaactcacagagttgaacgatcctttacacagagcagacttgaaacactctttttgtgaaatttgcaagtggagatttcagccgctttgaggtcaatagtagaaaaggaaatatcttcgtagaaaaactagacagaatgattctcagaaactcctttctgatgtgtgcattcaactcacagagtttcacctttcttttcatagagcagttaggaaacactctgtttgtaaagtctgcaagtggatattcagacctccttgaggccttcgttggaaacgggatttcttcatattctactagacagaatcattctcagaaactgctgcgtgatgtgtgcgttcaactctcagagtttaacttttcttttcattcagcggtttggaaacactctgtttctaaagtctgcacgtggaaattttgaccacttagaggccttcgttggaaacgggtttttttcatgtaaggctagacagaagaattcccagtaactttccttgtgttgtgtgcattcaactcacagagttgaacgttcccttagaccgagcagatttgaaacactctatttgtgcaatttgcaagtgtagttttcaagctctttaaggtcaacggcagaaaaggaaatatcttcgtttcaaaactagacagaatcattcccacaaactgcgttgtgatgtgttcgttcaactcacagagtttaacctttctgttcatagagcagttaggaaacactctgtttgtaaagtctgcaagtggatattcagacctcctagaggccttcgttggaaacaggatttcttcatattctgctagacagaagaattctcagtaacttccttgtgttgtgtttattcaactcacagagttgaatgatcctttacacagagcagacttgaaacactctttttgtggaatttgcaagtggagatttcagccgctttgtggtcaatggtagaaaaggaaatatcttcgtataaagactagacagaatgattctcagaaactcctttgtgatgtgtgtgttcaactcacagagtttaacctttcttttcatagagcagttaggaaacactctgtttgtaaagtctgcaagtggatattcagacctctttgaggccttcgttggaaactggtttttttcatgtaaggctagacagaagatttcccagtaacttccttgtgttgtgtgtgttcaactcacagagttgaactttcatttacacagagcagatttgaaacactctttttgtggaatttgcaaatggagatttcaagcgctttgaggccaaaggcagaaaaggaaatatcttcgtatgaaaactagacagaatcattctcagaaactgctctgcgatgtgtgcgttcaactctcagagtttaacttttcttttcattcagcagtttggaaacactctgtttgtaaagtctgcacgtggatatgttgaccacttagaggccttcgttggaaacgggtttctttcctgtaaggctagatagaagaattcccagtaacttccttgtgttgtgtacattcaactcacagagttgaacgttcccttagacagagcagatttgaaacactctttttgtgcaattggcaagtggagatttcaagcgctttaaggtcaatggcagaaaaggaaatatcttcgtttcaaaactagacagaatcattcccacaaactgcgttgtgatgtgttcgttcaactcacagagtttaaccattctgttcatagagcagttaggaaacactctgtttgtaaagtctgtaagtggatattctgacatcttgtggccttcgttggaaaagggatttattcatattctgctagacagaagaattctcagtaacttccttgtgttgtgtttattcaactcacagagttgaatgatcctttacacagagcagacttgaaacactgtttttgtggaatttgcaagtggagatttcagccgctttgaagtcaatggtagaaaagtaaatatcttcgtataaaaactagacagaatgattctcagaaactcctttgtgatgtgtgcgttcaactcacagagtttaacctttcttttcatagagcagttaggaaacactctgtttgtaaagtctgcaagtggatattcagacatctttgaggctttcgttggaaacgggatttcttcgtattctgctatacagaagaattctcagtaacttccttgtgttgtgtgtattcaactgacagagttgaactttcatttaggtagagcagatttgaaacactgtttttgtggaatttgcaagtggagatttcaagcgctttggggccaaaggcagaaaaggaaatatcttcgtataaaaactagacagaatcattctcagaaactgctgcgtgatgtgtgcgttcaactctcagagtttaacttttcttttcattcagcggtttggaaacactctgtttgtaaagtctgcacgtggaaattttgaccacttagaggccttcgttggaaacgggattttttcatgtaaggctagacagaagaattcccagtaacttccttgtgttgtgtgcattcaactcacagagttgaacgttcccttagacagagcagatttgaaacactctatttctgcaatttgcaagtgtagttttcaagctctttaaggtcaacggcagaaaaggaaatatcttcgtttcaaaactagacagaatgattctcagaaactcctttgtgatgtgtgcgttcaactcacagagtttaacctttcttttcatagagcagttaggaaacactctgtttgtaaagcctgcaagtggatattcagacatccttgaggctttcgttggaaacgggatttcttcatattctgctagaaagaagaattctgagtaacttccttgtgttgtgtgtattcaactcacagagttgaacgatcctttacacagagcagacttgtaacactctttttgtggaatttgcaagtggagatttcagccactttgaagtcaaaggtagaaaaggaaataagttcctataaaaactagacagaatgattctcagaaaatcctttgtgatgtgtgcgttcaactcacagagtttaacttttgttttcatagagcagttaggaaacactctgtttgtaaagtctgcaagtggatattcagacctctttgaggccttcattggaaacgggatttcttcatattatgctagacagaagaattcccagtaacttccttgtgttgtgtgttttttaagtcacagagttgaactttcatttacacagagcagatttgaaacactctttttgtggaatttgcaagtggagatttcaagtgctttgaggccaatggcagaaaaggaaatatcttcgtataaaaactagacagaatcattctcagaaactgctctgcgatgtgtgcgttcaactctcagagtttaacttttcttttcattcaacagtttgaaaacactctgtttgtaaagtctgcacgtggatattttgaccacttagaggccttcgttggaaacgggtttttttcctgtaaggctagacagaagaattctcagtaacttccttctgttgtgtgtattcaactcacagagttcaacgatcctttacacagagcagacttgaaacactctttttgtggaatttgcaagtggacatttcagccgctttgaggtcaatggtagaaaaggatatatcttcgtataaaaactagacagaattattctcagaaactcctttgtgatgtgtgcgttcaactcacagagtttaacctttcttttcgtagagcagttaggaaacactctgtttgtaaagtcggcaagtggatattcagacctctttggggccatcgttggaaatgggatttcttcatattctgctagacagaagaattctcagtaacttccttgtgttgtgtgtattcaactgacagagttgaacgatcctttacacagagcagacttgaaacacactttttgtggattttgcaagtggagatttcagcctctttgagatcaatggtagaataggaaatatcttcctatagaaactagacagaatgattctcagaaactcctttgtgatgtgtgcgttcaagtcacagagtttaacctttcttttcatagagcagttaggaaacactctgtttgtaaagtctgcaagtggatattcagacctctttgaggccttcgttggaaacgggtttttttcatataaggctagacagaagaattctcagtaacttccttgtgttgtgtgtattcaactgacagagttgaactttcatttagagagagcagatttgaaacactgtttttgtggaatttgcaagtggagatttcaagccctttggggccaaaggcagaaaaggaaatatcttcgtgtaaaaattagacagaatcattctcagaaactgctgcgtgatgtgtgcgttcaactctcagagtttaacttttcttttcattcagcggtttggaaacactctgtttgtaaagtctgcacgtggatattttgaccacttagaggccttcgttggaaacgggtttttctcatgtaaggctagacagaagaattcccagtaacttccttgtgttgtgtacattcaactcacagagttgaacgttcccttagacagaggagatttgaaacactctttttgtgcaattggcaagtggagatttcaagcgctttaaggtcaatggcagaaaaggaaatatcttcgtttcaaaactagacagaatgattctcagaaactactttgtgatgtgtgcgttcaactcacagagtttaacctttcttttcctagagtagttaggaaacactctgtttgtaaagtctgcaagtggatattcagacctctttgtggccttcattggaaacgggatttcttcatattatgctagacagaagaattctcagtaacttccttgtgttgtgtgcattcatatcacagagttgaacgatcctttacgcagagcagattagaaacactctttttgtggaacttgcaattggagatttcagccgctttgaggtcaatggtagaaaaggaaatatctttgtataaaaactagacagaatgattctcagaaactcctttgtgatgtgtgcgttcaactcacagagtttaacctttcttttcatagagcagttaggaaacactctgtttgtaaagtctgcaagtggatattcagacctctttgaggccttcgttggaaacgggtttttttcatataagcctagacagaagaattcccagtaacttccttgtgttgtgtgtgttcaactcacagagttgaactttcatttacacagagcagatttgaaacactctttttgtggaatttgcaggtggagatttcaagcgctttgaggccaaaggcagaaaacgaaatatcttcgtataaaaactagacagaatcattctcagaaagtgctctgcgatgtgtgtgttcaactctcagagtttaacttttcttttcattcagcagtttggaagcactctgtttgtaaagtctgcacgtggataatttgaccacttagaggccttcgttggaaacgggtttttttcctgtaaggctagacagaagaattcccagtaacttccttgtgttgtgtacattcaactcacagagttgaacgttcccttagacagagcagatttgaaacactctttttgtgcaattggcaagtggagatttcaagcgctttgaggtcaatggcagaaaaggaaatatcttcgtttcaaaagtagacagaatcattcccacaaactgcgttgtgatgtgttcgttcaactcacagagtttaacctttctgttcatagagcagttaggaaacactctgtttgtaaactctgtaagtggatattctgacatcttgtggccttcgttggaaacgggatttcttcacattctgctagacagaagaattctcagtaacttccttgtgttgtgtgtattcaactcacagagttgaacgatcctttacacagagcagacttgtaacactctttttgtggaatttgcaagtggagatttcagccgctttgacgtcaaaggtagaaaaggaaatatcttcctataaaaactaggcagaatgattctcagaaaatcttttgtgatgtgtgcgttcaactcacagagtttaacttttgttctcatagagcagttaggaaacactctgtttgtaaagtgtgcaagtggatattcagacctctttgaggccttcgttggaaacgggatttcttcatattctgctagacagaagaattcccagtaacttccttgtgttgtgtgtgttcaactcacagagttgaacgatcctttacacagagcagacttgtaacactctttttgtggaatttgcaaatggagatttcaagcgctttgaggccaaaggcagaaaaggaaatatcttcgtataaaaactagacagaatcattctcagaaactgctctgcgatgtgtgcgttcaactctcagtgtttaacttttcttttcattcagcagtttggaaacactctgtttgtaaagtctgcacgtggataacttgaccacttagaggccttcgttggaaacgggtttttttcatgtaaggctagacagaagaattctcagtaacttccttgtgttgtgtgtattcaactgacagagttgaacgatcctttacacagagcagacttgtaacactctttttgtggaatttgcaagtggagatttcagccgctttgaagtcaaaggtagaaaaggaaatatcttcctataaacactagacagaatcattcccacaaactgcgttgtgatgtgttcgttcatctcacagagtttaacctttcttttcatagagcagttaggaaacagtctgtttgaaaattctgtaaggggatattctgacatcttgtggccttcgttggaaacgggatttcttcatattctgctagacagaagaattctcagtaacttccttgtcttgtgtgtattcaactcacagagttgaacgatcctttacacagagcagacttgaaacactctttttgtggaatttgcaagtggagatttcagccgctttgaggtcaatggtagaaaaggaaatatcttcgtataaaaactagacagaatgattctcagaaactcctttgtgatgtgtgtgttcaactcacagagtttaacctttcttttcatagagcagttagtaaacactctgtttataaattctgcaagtggatattcagacccctttgaggccttcgttggaaacgggatttcttcatattatgctagacagaagagttcccagtaacttccttgtgttgtgtgtgttcaactcacagagttgaactttcatttacacagagcagatttgaaacactctttttgtggaatttgcaagtggagatttcaagcgctttgaggacaaaggcagaaaaggaaatatcttcgtataaaaactagacagaatcattctcagaaactgctctgtgatgtgtgcgttcaactctcagagtttaacttttcttttcattcagcagtttggaaacactctgtttctaaagtctgcacgtggataatttgaccacttagaggccttcgttggaaacgggtttttttcatgtaaggctagacagaagaattcccagtaacttccttgtgttgtgtacattcaactcacagagttgaacgttcccttagacagaacacatttgaaacactctttttgtgcaattggcaagtggtgatttcagccgctttgaggtcaatggtagaaaacgaaatatcttcgtataaaaactagacagaatcattcccacaaactgcgttgtgatgtgttcgttcaactcacagagtttaacctttctgttcatagagcagttaggaaacactctgtttgtaaagtctgtaagtggatattctgacatcttgtggtcttcgttggaaacgggatttcttcatattctgctagacagaagaattctcagtcacttccttgtgttgtgtgtattcaactcacagagttgaacgatcctttacacagagcagacttgaaacactctttttgtggaatttgcaagtggagatttcagccgctttgaggtcaattgtagaataggatatatcttcgtatagaaactagacagaatgattctcagaaactccttagtgatgtgtgcgttcaactcacagagtttaacctttctgttcatagagcagttaggaaacactctgtttgtaaagtctgcaagtggatattcagacctccttgaggccttcgttggaaacgggatttcttcatattctgctagacagaagaattcccagtaacttccttgtgttgtgtgtgttcaactcacagagttgaactttcatttacacagagcagatttgaaacactctttttgtggaatttgcaaatggagatttcaagcggtttgaggccaaaggcagaaaaggaaatatcttcgtataaaaactagacagaatcattctcagaaactgctgcgtgatgtgtgcgttcaactctcagagtttaacttttcttttcattcagcggtttggaaacactctgtttgtaaagtctgcacgaggaaattttgaccacttagaggccttcgttggaaacgggtttttttcatctaaggctagacagaagaattcccagtaacttccttgtgttgtgtgcattcaactcacagagttgaacgttaccttagacagagcagatttgaaacactctatttgtgcaatttgcaagtgtagatttcaagcgctttaaggtcaacggcagaaaaggaaatatcttcgtttcaaaactagacagaatcattcccacaaactgcgttgtgatgtgttcgttcaactcacagagtttaacctttctgttcatagagcagttaggaaacactctgtttgtaaagtctgtaagtggatattctgacatcttgtggccttcgttggaaacgggatttcttcatattctgctagacagaagaattctcagaaacttccttgtgttgtgtgttttcaactcacagagttgaacgatcctttacacagagcagacttgaaacactccttttgtggaatttgcaagtggagatttcatccgctttgaggtcaatggtagaataggaaatatcttcctatagaaagtagacagaatgattctcagaaactcctttgtgatgtgtgcgtacaactcacagagtttaacctttcttttcatagagcagttaggaaacactctgtttgtaaagtctgcaagtggatattcagacctctttgaggccttcgttggaaacgggtttttttcatataaggctagacagaagaattcccagtaacttccttgtgttgtgtgtgttcaactcacagagttgaactttcatttacacagagccgatttgaaacactctttttgtggaatttgcaagtggagatttcagccgctttgaggtcaatggtagaaaaggaaatatcttcgtataaaaactagacagaatgattctcagaaagtcctttgtgatgtgtttgttcaactcacagagtttaacctttcttttcatagagcagttaggaaacactctgtttgtaaagtctgcaagtggatattcagacctctttgaggccttcgttggaaacgggatttcttcatattctgctagacagaagaattctcagtaacttccttgtgttgtgtgtattcaactcacagagttgaacgatcctttacacagagcagacttgaaacactctttttgtggaatttgcaactgtagatttcaagcgctttaaggtcaatggcagaaaaggaaatatcttcgtttcaaaactagacagaatcattcccacagactgcgttgtgatgtgttcgttcaaatcacagagtttaacctttcttttcatagagcagttaggaaacagtctgtttgtaaattctgtaagtggatattctgacaacttgtggccttcgttggaaacgggatttcttcatattctgctagacagaataattctcagtaacttccttgtgttgtgtgtattcaactcacagagttgaacgatcctttacacagagcagaattgaaacactctttttgtggaatttgcaagtcgagatttcagccgctttgaggtcaatagtagaaaaggaaatatcttcgtagaaaaactagacagaatgattctcagaaactcctttgtgatgtgtgcgttcaactcacagagtttaacctttcttttcatagagcagttatgaaacactctgtttgtaaagtctgcaagttgatattcagacctccttgaggccttcgttggaaacgggatttcttcatattatgctagacagaagaattcccagtaacttccttgtgttgtgtgtgttcaactcacagagttgaactttcatttacacagagcagatttgaaacactctttttctggaatttgcaaatggagatttcaagcgctttgaggccaaaggcagaaaaggaaatatcttcgtataaaaactagacagaatcattctcagaaactgctctgcgatgtgtgcgttcaactctcagagtttaacttttcttttcattcagcagtttggaaacactctgtttgtaaagtctgcacgtggatattttgaccacttagaggccttcgttggaaacgggctttttcctgtaaggctagacagaaagaattcccagtaacttccttgtgttgtgtacattcaactcacagagttgaacgttcccttagacagagcagatttgaaacactctttttgtgcaattggcaaatggagatttcaagcgctttaaggtcaatggcagaaaaggaaatatcttcgtttcaaaactagacagatgattctcagaaactcctttgtgatgtgtgcgttcaactcacacagtttaacctttctttccatagagcagttaggaaacactctgtttgtaaagtctgcaagtggatattcagacctcctacaggccttcgttggaaacgggatttcttcatattatgctagacagaagaattctcagtaacttccttgtgttctgtgtattcaactcacagagttgaacgatactttacacagagcagacttgaaacactctttttgtggaatttgcaagtggagatttcagccgctttgaggtcaattgtagaaaaagaaatatcttcgtatagaaactagacagaatgattctcagaaactcctttgtgatgtgtgcgttcaactcagagagtttaacctttcttttcatagagcagttaggaaacacgctgtttataaagtctgcaagtggatattcagacccctttgaggccttcgttggaaacgggatttcttcatattatgctagacagaagaattcccagtaacttccttgtgttgtgtgtgttcaactcacagagttgaactttcatttacacagagcagatttgaaacactctttttgtggaatttgcaagtggagatttcaagcgctttgaggccaaaggcagaaaagcaaatatcttcgtataaaaactagacagaatcattctcagaaactgctctgcgatgtgtgcgttcaactctcagagtttaacttttcttttcattcagcagtttggaaacactctgtttgtaaagtctgcacgtggataatttgaccacttagaggccttcgttggaaacgggattttttcatgtaaggctagacagaagaattcccagtaacttccttgtgttgtgtacattcaactcacagagttgaacgttccgttagacagagcagatttgaaacactctttttgtgcaattggcaagtggagatttcaagcgctttgaggtcaatggcagaaaaggaaatatcttcgtttcaaaactagacagaatcattcccacaaactgcgttgtgatgtgttcgttcaactcacagagtataacctttctgttcatagagcagttaggaaacactctgtttgtaaagtctgtaagtggatattctgacatcttgtggccttcgttggaaacgggatttcttcatattctgctagacagaagaattctcagaaacttccttgtgttctgtgttttcaactcacagagttgaacgatgctttacacagagtagacttgaaacactctttttgtggaatttgcaagtggagttttcagccgctttgaggtcaatggtagaaaaggaaatatcttcgtataaaaactagacagaatgattctcagaaactactttgtgatgtgtgcgttcaactcacagagtttaacctttcttttcatagagcagtgaggaaacactctgtttgtaaagtctgcaagtggatattcagacctccttgatgccttcgttggaaacgggatttcttcatattatgctagacagaagaattcccagtaacttcccttgtgttgtgtgtgttcaactcacagagttgaactttcatttacacagagcagatttgaaacactctttttgtggaatttgcaagtggagatttcaagcgctttgaggccaaaggcagaaaaggaaatatcttcgtataaaaactagacagaatcattctcagaaactgctctgcgatgtgtgcgttcaactctcagagtttaacttttcttttcattcagcagtttggaaacactctgtttgtgaagtctgcacgtcgatattttgaccacttagaggccttcgttggaaacgggtttttttcctgtaaggctagagagaagaattcccaggaacttccttgtgttgtgtacattcaactcacagagttgaacgttcccttagacagagcagatttgaaacactctttttgtgcaattggcaagtggtgatttcagccgctttgaggtcaatggtagaaaaggaaatatcttcgtataaaaactagacagaatgattctcagaaacttcattgtgacgtgtgcgttcaactcacagagtttaacctttcttttcatagagcagttaggaaacactctgtttgtaaagtctgcaagtggatattcagacctctttgaggccttcgttggaaacgggatttcttcataatgtgctagacagaagaattctcagtaacttccttgtgttgtgtgtattcaactcacagagttgaacgatcctttacacagagcagacttgaaacactctttttgtggaatttgcaagtggagatttcatccgctttgaggtcaatggtagaataggaaatatcttcctatagaaactagacagaatgattctcataaactcctttgtgatgtgtgcgttcaactcacagagtttaacctttcttttcatagagcagttaggaaacactctgtttgtaaagtctgcaagtggatattcagacctccttgaggccttcgtttgaaacgggatttcttcatattctgctagacagaagaattcccagtaacttccttgtgttgtgtgtgttcaactcacagagttgaactttcatttacacagagcagatttgaaacactctttttgtgcaatttgcaagtggagatttcaagcgctttgagaccaaaggcagaaaaggaaatatcttcgtttcaaaactagacagaatcattctcagaaactgctctgcgatgtgtgcgttcaactctcagagtttaacttttcttttcattcagcagtttggaaacactctgtttgtaaagtctgcacgtggatatgttgaccacttagaggccttcgttggaaacgggtttttttcatgtaaggctagacagaagaattcccagtaacttccttgtgttgtgtgcattcaactcacagagttgaactttcccttagacagagcagatttgaaacactctatttgtgcaatttgcaagtgtagatttcaagcgctttaaggtcaacggcagaaaaggaaatatcttcgtttcaaaactagacagaatcattcccacaaactgcgttgtgatgtgttcgttcaactcacagagtttaacctttcttttcatagagcagttaggaaacagtctgtttgtcaattctgtaagtggatattctgacatcttgtggccttcgttggaaacgggatttcttcatattctgctagacacaagaattttcagtaacttccttgtgttgtgtgtattctactcacagagttgaacgatcctttacacagagcagacttgaaacactctttttgtggaatttgcaagtggagatttcagccgctttgaggtcaatggtagaaaaggaaatatcttcgtataaagactagacagaatgattctcagaaactcctttgtgatgtgtgcgttcaactcacagagtttaacctttcttttcatggagctgttaggaaacactctgtttgtaaagtctgcaagtggatattcagacctctttgaggccttcgttggaaacgggatttcttcatactgtgctagacagaagaattctcagtaactttcttgtgttgtgtgtattcaactgacagagttgaactttcatttagagagagcagatttgaaacactgtttttgtggaatttgcaagtggagatttcaagcgctttggggccaaaggcagaaaaggaaatatcttcgtataagcactagacagaatcattctcagaaactgctctgcgatgtgtgcgttcaactctcagagttaaacttttcttttcattcagcagtttggaaacactctgtttgtaaagtctgcacgtggatattttgaccacttagaggccttcgttggaaacgggtttttttcctgtaaggctagacagaagaattcccagtaacttccttgtgttgtgcgcattcaactcacagagttgaacgttcccttagacagagcagatttgaaacagcctatttgtgcaatttgcaagtgtacatttcaagcgctttaaggtcaacggcagaaaaggaaatatcttcctttcaaaactagacagaatcactcccacaaactgcgttgcgatgtgttcgttcaactcacagagtttaacatttcttttcatagagcacttaggaaacagtctgtttgtaaattctgtaagtggatattctgacatcttgtggccttcgttggaaacgggatttcttcatattctgctagacagaagaattctcagtaacttccttgtgttgtgagtattcaactcacagagttgaacgatcctttacacagagcagacttgaaacactctttttgtggaatttgcaagaggagatttcagccgctttgaggtcaatagtagaaaaggaaatatcttcgtagaaaaactagacagaatgattctcagaaactcctttgtgatgtgtgcgttcaactcacagagtttaacctttcttttcatagagcagttaggaaacactctgtttgtaaagtctgcaagtggatattcagacctctttgaggccttcgttttaaacgggatttcttcatattatgctagacagaggaattcccagtaacttccttgtgttgtgtgtgttcaactcacagagttgaactttcatttacacagagcagatttgaaacactctttttgtggaatttgcaagtggagatttcaagcgctttgaggccaaaggcagaaaaggaaatatcttcgtttcaaaactaggcagaatcattctcagaaactgctctgcgatgtgtgtgttcaactctcagagtttaacttttcttttcattcagcagtttggaaacactctgtttgtaaagtctgcacgtggataatttgaccacttagaggccttcgttggaaacgggtttttttcagtaaggctagatagaagaattcccagtaacttccttgtgttgtgtgcattcaactcacagagttgaacgttcccttagacagagcagatttgaaacactctatttgtgcaatttgcaagtgtagatttcaaccgctttaaggtcaacggcagaaaaggaaatatcttcgtttcaaaactagacagaaatcattcccacaaactgcgttgtgatgtgttcgttcaactcacagagtttaacctttcttttcatagagcagttaggaaacagtctgtttgtcaattctgtaagtggatattctgacatcttgtggcattcgttggaaacgggatttcttcatattctgctagacagaagaactctcagaaacctcctggtgttgcgtgttttcaactcacagagttcaacgatccgttacacagagtagacttgaaaaactctttttgttgaattggccagtggagatttcagccgctttgaggtcaatggtagaaaaggaaatatcttcgtataaaaactagacagaacgattctcagaaactcctttgtgatgtgtgtgttcaactcacagagtttaacctttcttttcatagagcagttaggaaacactctgtttgtaaagtctgcaagtggatattcagacctctttgaggccttcgttggaaacgggatttctccatattctgctagacagaagaattctcagtaacttccttgtgttgtgtgtattcaactgacagagttgaactttcatttagagagagcagatttgtaagactgtttttgtggaatttgcaagtggagatttcaagcgctttgcggccaaaggcagaaaaggaaatatcttcgtataaaaactagacagaatcattctcagaaactgctctgtgatgtgtgcgttcaactctcagagtttaacttttcttttcattcagcagtttcgaaacactctgtttgtaaagtctgcacgtggatattttgaccacttagaggccttcgttggaaacgggttttcttcatgtaaggctagacagaagaattcccagtaacttccttgtgttgtgtgcattcaactcacacagatgaacgttcccttagacagagcagatttgaaacactctatttgtgcaatttgcaagtgtagatttcaagcgctttaaggtcaatggcagaaaaggaaatatcttcgtttcaaaactagacagaatgattctcagaaactcctttgtgatgtgtgcgttcaagtcacagagtttaacctttcttttcatagagcagttaggaaacactctgtttgtaaagtctgcaagtggatattcagacctccttgaggccttcgttggaaacgggatttcttcctattatgctagacagaagaattctcagtaacttccttgtgttgtgtgtattcaactcacagagttgaaccatcctttacacagagcagacttgaaacactctttttgtggaatttgcaagtggagatttcagccgctttgaggtcaatggtagaaaaggaaatatcttcgtataaaaactagacagaaatgattctcagcaaactcctttgtgaggtgtgtgttcaactcacagagtttaacctttcttttcatagagcagttagtaaacactctgtttataaagtctgcaagtggatattcagacccctttgaggccttcgttggaaacgggatttcttcatattctgctagacagaagaattctcagtaacttccttgtgttgtgtgtattcaactgacagagttgaactttcatttagagagagcagatttgaaacactgtttttgtggaatttgcaagtggagatttcaagcgctttggggccaaaggcagaaaaggaaatatcttcgtataaaaactagtcagaatcattctcagaaactgctgcgtgatgtgtgcgttcaactctcagagtttaacttttcttttcattcagcggtttggaaacactctgtttgtaaagtctggacgtggaaattttgaccacttagaggccttcgttggaaacgggtttttttcatgtaaggctagacagaagaattcccagtaacttccttgtgttgtgtgcattcaactcacagagttgaacgttcccttagacagagcagatttgaaacactctatttgtgcaatttgcaagtgtagttttcaagctcttttaggtcaacggcagaaaaggaaatatcttggtttcaaaactagacagaatcattctcagaaactgctctgcgatgtgtgcgttcaactctcagagtttaacttttcttttcattcagcagtttggaaacactctgtttgtgaagtctgcacgtggataatttgaccacttagaggcctacgttggaaacgggtttttttcatgtaaggctagacagaagaattctcagaaacttccttgtgttgtgtgttttcaactcacagagttaaacgatccattacacagagtagacttgaaacactctttttgtggaattggcaagtggagatttcagccgctttgaggtcaatggtagaataggaaatatcttcctatggaaactagacagaatgattctcagaaactcctttgtgatgtgggcgttcaactcacagagttcaacctttcttttcatagagcagttgggaaacactctgtttgtaaagtctgcaagtggatattcagacttctttgaggccttcgttggaagcgggatttcttcatattctgctagacagaagaattcccagtaacttccttgtgttgtgtgtgttcaactcacagagttgaactttcatttacacagagcagatttgaaacactctttttgtggaatttgcaagtggagatgtcaagcgctttgaggccaaaggcagaaaaggaaataccttcgtttcaaaactagacagaatcattctcagaaactgctctgcgatgtgtgcgttcaactctcagagtttaacttttcttttcattcagcagtttggaaacactctctttgtaaagtctgcacttggatattttgaccacttagaggccttcgttggaaacgggtttttttcctgtaaggctagacagaagaattcccagtaacttccttgtgttgtgtacattcaactcacagagttgaacgttcccttagacagagcagatttgaaacactctttttgtgcagttggcaaatggagatttcaagcgctttaaggtcaatggcagaaaaggaaatatcttcgtttcaaaactagacagaatcattcccacaaactgcgttgtgatgtgttcgttcaactcacagagtttaacaattcttttcatagagcagttaggaaacactctgtttgtaaattctgtaagtggatattctgacatcttttggccttcgttggaaacgggatttcttcatattctgctagacagaagaattctcagtaacttccttgtgttgtgtgtattcaactcacagagttgaacgatcctttacacagagcggacttgaaacactcgttttgtggaatttgcaagtggaggtttctgccgcgttgaggtcaatggtagaaaaggaaatatcttcgtataaaaactagacagaatgattctcagaaactcctttgtgatgtgtgagttcaactcacagagtttaacctttcttttcatagagcagttaggaaacactctgtttgtaaagtctgcaagaggatattcagacctctttgaggccttcgttggaaacgggttttattcatataaggctagacagaagaattctcagtaacttccttgtgttgtgtgtattcaactcacagagttgaacgatcctttacacagagcagacttgaaacactctttttgtggaaattgcaagtggagatttcagccgctttgaggtcaatgatagaaaaggaaatatcttcgtataaaaactagacagaatcattctcagaaactgctgcgtgatgtgtgggttcaactctcagagtttaacttttcttttcattcagcggtttggaaacactctgtttgtaaagtctgcacgtggaaattttgaccacttagaggccttcgttggaaacgggtttttttcatgtaaggctagacagaagaattcccagtaacttccttgtgttgtgtgcattcaactcacagagttgaacgttcccttagacagagcagatttgaaacactctatttgtgcaatttgcaagtgtagatttcaagcgcattaaggtcaatggcagaaaaggaaatatcttcgtttcaaaattagacagaatcactcccacaaactgcgttgtgatgtgttcgttcaactcacagagtttaacctttcttttcttagagcagttaggaaacagtctgtttgaaaattctgtaagtggatattctgacatcttgtggccttcgttggaaacgggatttcttcatattctgctagacagaataattctcagtaacttccttgtgttgtgtgtattcaactcacagagttgaacgatcctttacagagagcagacttgaaacactctttttgtggaatttgcaagtggagaattcagccgctttgaggtcaatggtagaaaaggaaatatcttcgtataaagactagacagaatgattctcagaaactcctttgtgatgtgtgcgttaaactcacagagtttaacttttcttttcatagagcagttaggaaacactctgtttgtaaagtctgcaagtggatattcagacctctttgacgccttcgttggaaacgggatttcttcatattctgctagacagaagaattctaagtaacttccttgtgttgtgtgtattcaactgacagagttgaactttcatttagagagagcagatttgaaacactgtttttgtggaatttgcaagtggagatttcaagcgctttggggccaaaggccgaaaagtaaatatcttcgtataaaaactagacagaatcattctcaaaaactgctgcgtgatgtttgcgttcaactctcagagtttaacttttcttttcattcagcggtttggaaacactctgtttgtaaagtttgcacgtggatattttgaccacttagaggccttcgttggaaacgggtttttttcatgtaaggctagacagaagaattcccagtaacttccttgtgttgtgtgcattcaactcacagagttgaacagttcccttagacagagcagatttgaaacactctatttgtgcaatttgcaagtgtagatttcaagcgctttaaggtcaatggcagaaaaggaaatatcttcgtttcaaaactagacagaatgattctcagaaactcctttgtgatgtgtgcgttcaactcacagagtttaacctttcttctcatagagcagttaggaaacactctgtttgtaaagtctgcaagtggatattcagacctcttttaggccttcgttggaaacgggatttcttcatattctgctagacagaagaattctcagtaacttccttgtgttgtgtattcaactcacagagttcaacgatcctttacacagagcagacttgaaacactctttttgtggaatttgcaagtggggatttcagccgctttgaggtcaatgttagaaaaggaaatatcttcgtataaaaactagacagaatgattctcagaaactcctttgtgatgtgtgcgttcaactcacagagttcaacctttcttttcatagagcagttaggaaacactctgtttataatgtctgcaattggatattcagacctctttgaggccttcgttggaaacgggatttcttcatattctgctagacagaagaattcccagtaacttccttgtgttgtgtgtgttcaactcacagagttgaactttcgtttacacagagcagatttgaaacactctttttgtggaatttgcaagtggagatttcaagcgctttgaggccaaaggcagaaaaggaaatatcttcgtataaaaactagacagaatcattctcagaacctgcttcgtgatgtgtgcgttcaactctcagagtttaacttttcttttcattcagcggtttggaaacactctgtttgtaaagtctgcacgtggaaattttgaccacttagaggccttcgttggaaacgggtttttttcatgtaaggctagacagaagaattcccagtaacttccttgtgttgtgtgcattcaactcacagagttgaacgttcccttagacagagcagatttgaaacactctatttgtgcaatttgcaagtgtagatttcaagcgctttaaggtcaatggcagaaaaggaaatatcttcgtttcaaaactagacagaatcattcccacaaactgcgttgtgatgtgttcgttcaactcacagagtttaacctttctattcatagagcagttaggaaacactctgtttgtaaagtctgtaagtggatattctgacatcttgtggccttcgttggaaacgggatttcttcatattctgctagacagaagaattctcagtaacttccttgtgttgtgtgtattcacctcacagagttgtatgatcctttacacagaagagtcttgaaacactctttttgtggaatttgcaagtggagatttcagccgctttgaagtcaatggtagaataggaaatatcttcctatagaaactagacagaatgattctcataaactcctttgtgatgtgtgcgttcaactcacagagtttaacctttcttttcatagagcagttaggaaacactctgcttgtaaagtctgcaagtggatattcagccctctttgaggccttcgttggaaacgggtttttttcatataaggctagacagaagaattcccagtaacttccttgtgttgtgtgtgttcaactcacagagttgaactttcatttacacagagcagatttgaaacactctttttgtggaatttgcaaatggagatttcaagtgctttgaggccaaaggcagaaaaggaaatgtcttcgtttcaaaactagacagaatcattctcagaaactgctctgcgatgtgtgcgttcaactctcagagtttaacttttcttttcattcagcagtttggaaacactctgtttgtaaagtctgcacctggataacttgaccacttagaggccttcgttggaaacgggtttttttcctgtaaggctagacagaagaattcccagtaacttccttgtgttgtgtgcattcaactcacagagttgaacgttcccttagacagagcagatttgaaacactctatttgtgcaatttgcaagtgtacatttcaagcgctttaaggtcaacggcagaaaaggaaatatcttcgtttcaaaactagacagaatgattctaagaaacttctttgtgatgtgtgcgttcaactcacagagtttaacctttcttctcatagagcagttaggaaacactctgtttgtaaactctgcaagtggatattcagacctctttgaggccttcgttggaaacgggatttctccatactgtgcgagacagaagaattctcagtaacttccttgtgttgtgtggattcaactcacagagttgaacgatcctttacagagagcggacttgaaacactcgttttgtggaatttgcaagtggagatttcagccgctttgaggtcaatggtagaaaaggaaatatcttcgtacaaaaactagacagataatcattcccacaaactgcgttgtgatgtgttcgttcaactcacagcgttttacctttctgttcatagagcagttaggaaacactctgtttgtcaagtctgtaagtggatattctgacatcttgtggccttcgttggaaatgggatttcttcatattctgctagacagaagaattcccagtaacttccttgtgttgtgtgtattcaactcacagagttgaactttcatttacacagagcagattggaaacactctttttgtggaatttgcaagtggagatttcaagcgctttgaggccaaatgcagaaaaggaaatatcttcgtataaaaactagacagaatcattctcagaaactgctctgcgatgtgtgcgttcaactctcagagtttaacttttcttttcattcagcagtttggaaacactctgtttgtaaagtctgcacgtggatattttgaccacttagaggccttcgttggaaacgggtttctttcttgtaaggctagacagaagaattctcagtaacttccttgtgttgtgtgtattcaactcacagagttgaatgatcttttacacagaacagacttgaaacactctttttgtggaatttgcaagtggagatttcagccgctttgaggtcaatggtagaaaaggaaatatcttcgtataaaaactagacagaatgattctcagaaactcctttgtgatgtgtgcgttcaactcacagagtttaacctttcttttcatagagcagttaggaaacactctgtttgtaaagtctggaagtggatattcagacctctttgaggccttcgttggaaacgggatttcttcatattctgctagagagaagaattctcagtaacttccttgtgttgtgtgtattcaactcacagagttcaacgatcctttacacagagcagacttgaaacactctttttgtggaatttgcaagtggagatttcagccgctttgaggtcaatggtagaataggaaatatcttcctatagaaactagacagaatgattctcagaaactcctttgtgatgtgtgcgttcaactcacagactttaacctttcttttcatagagcagttaggaaacactctgtttgtaaagtctgcaagtggatattcagacctccttgaggccttcgttggaaacgggatttcttcatattatgctagacagaagaattctcagtaacttccttgtgttgtgtgtattcaactgacagagttgaactttcatttggagagagcagatttgaaacactgtttttgtggaatttgcaagtggagatttcaagcgctctggggccaaaggcagaaaaggaaatatcttcgtataaaaactagacagaatcattctcagaaactgctgtgtgatgtgtgcgttcaactctcagagtttaacttttcttttcattcagcggtttggaaacactctgtttgtaaagtctgcacgtggatattttgaccacttagaggccttcgttggaaacgggtttttttcatgtaaggctagacagaagaattctcagtaacttccttgtgttgtgtgtattcaactcacagagttgaacgatcctttacacagagcagacttgaaacactctttttgtggaatttgcaagtggagatttcagccgctttgagttcaatggtagaataggaaatatcttcctatagacactagacagaatgattctcagaaactcctttgtgatgtgtgcgttcaactcacagagttcaacctttcttttcatagagcagttgggaaacactctgtttgtaaaatctgcaagtggatattcagacttctttgaggccttccttggaagcgggatttcttcatattcagctagacagattaattctcaataacttccttgtgttgtgtgtattcaactcacagagttgaacgatcctttacagagagcagacttgaaacactctttttgtggaatttgcaagtggagatttcagccgctttgaggtcaatggtagaatagggaatatcttcctatagaaactagacagagtgattctcagaaactcctttgtgatatctgcgttcaactaacagagtttaaactttcttttcatagagcagttaggaaacactctgtttgtaaagtctgcaagtggatattcagacctccttgaggccttcgttggaaacgggatttcttcatattctgctatacagaagaattctcagtaactgccttgtgttgtgtgtattcaactcacacagttgaacgatcctttacacagagcagacttgaaacactctttttgtggaatttgcaagtggagatttcagccgctttgaggtcaatggtagaataggaaatatcttcctatagaaactagacagaatgattctcagaaactcctttgtgatgtgtgcgttcaactcacagagtttatcctttcttttcatagagcagttgggaaacactctgtttgtaaagtctgcaagtggatattcagacatccttgaggctttcgttggaaacgggatttcttcatattctgctagaaagaagaattcccagtaacttccttgtgttgtgtgcattcaactcacagagttgaacgttcccttagagagagcagatttgaaacactctatttgtgcaatttgcaagtgtagatttcaagcgctttaaggtcaatggcagaaaaggaaatatcttcgtttcaaaactagacagaatcattcccacaaactgcgttgtgatgtgttcgttcaactcacagagtttaacctttccgttcatagagcagttaggaaacacactgtttgtaaagtctgtaagtggatattctgacatcttgtggccttcgttggaaacgggatttcttcatattctgctagacagaagaattctcagtaacttccttgtgttgtgtgtattcaactcacagagttgaactgatcctttacacagagcagacttgaaacactctttttgttgaatttgcaagtggagatttcagccgctttgaggtcaatagtagaaaaggaaatatcttcgtagaaaaactagacagaatgattctcagaaactcctttgtgatgtgtacgttcaactcacagagtttaacctttcttttcttagagcagttaggaaacactctgtttgtaaagtctgcaagtggatattcagacctctttgagtccttcgttggaaacgggtttttttcatataaggctagacagaagaattcccagtaacttccttgtgttgtgtgtgttcaactcacagagttgaactttcatttacacagagcagatttgaaacactccttttgtggaatttgcaagtggagatttcaagcgctttgaggccaaaggcagaaaaggaaatatcttcgtttcaaaactagacagaatcattctcagaaactgctgcgtgatgtgtgcgttcaactctcagagtttaacttttcttttcattcagcggtttggaaacactctgtttgaaaagtctgcacgtggatattttgaccacttagaggccttcgttggaaacgggtttttttcatgtaaggctagagagaagaattcccactaacttccttgtgttgtgtacattcaactcacagagttgaacgttcccttagacagagcagacttgtaacactctttttgtggaatttgcaagtggagatttcagccgctttcaagtcaaaggtagaaaaggaaatatcttcctataaaaactagacagaatcattcccacaaactgcgttgtgatgtgttcgttcaactcacagagtttaacctttctgttcatagagcagttaggaaacactctgtttgtaaagtctgcaagtggatattcagacctctttgaggccttcgttggaaacgggatttcttcatattctgctagacagaagaattctcagtaacttccttgtgttgtgtgtattcaactcacacagttgaacgatcctttacacagagcagacttgtaacactctttttgtggaatttgcaagtggagatttcagccgcttttaagtcaaaggtagaaaaggaaatatcttcctataaaaactagacagagtgattctcagaaactcctttgtgatgtctgcgttcaactcacagagtttaacctttcttttcatagagcagttaggaaacactctgtttgtaaagtctgcaagtgcatattcagacctccttgaggccttcgttggaaacgggatttcttcatattctgctatacagaagaattctcagaaacttccttgtgttttgtgtgttcaactcacagagttgaacgatcctttacacagagcagacttgaaacactctttttgtggaatttgcaagtggagatttcagccgctttgaggtcaatggtagaaaaggaaatatcttcgtataaaaactagacagaatcattctcagaaactgctgcgtgatgtgtgcgttcaactctcagagtttaccttttcttttcattcagcggtttggaaacactctatttgttaaagtctgcacgtggatattttgaccacttagaggccttcgttggaaacgggattttttcatgtaaggctagacagaagaattcccagtaacttccttgtgttgtgtgcattcaactcacagagttgaacgttcccttagacagagcagatttgaaacactctatttgtgcaatttgcaagtgtagatttcaagcgctttagggtcaaaggcagaaaaggaaatatcttcgtttcaaaactagacagaatcattcccacaaactgcgttgtgatgtgttcgttcaaatcacagagtttaacctttcttttcatagagcagttaggaaacagtctgcttgtaaattctgtaagtggatattctgacatcttgtggccttcgttggaaacggcatttcttcatattctgctagacagaagaattctcagtaacttccttgtattgtgtgtattcaactcacagagttgaacgatcctttacacagagcagacttgaaacactctttttgaggaatttgcaagtggagatttcagccgctttgaagtcaatggtagaaaaggaaatatcttcgtataaaaactagacagaatgattctcagaaactcatttgtgatgtgtgcgttcaactcacagagtttaacctttcttttcatagagcagttaggaaacactctgtttgtaaagtctgcaagtggatattcagacctttttgaggccttcgttggaaacgggatttcttcatatgatgctacacagaagaattctcagtaacttccttgtgctgtgtgtattcaactgacagagttgaactttcatttagacagagcagatttgaaacactctttttgtggaatttgcaagtggagattttaagcgctttgaggccaaaggcagaaaaggaaatatcttcgtataaaaactagacagaatcattctcagaaactgctctgcgatgtgtgcgttcaactctcagagtttaacttttcttttcattcagcagtttgaaaacactctgtttgtaaagtctgcacgtggatattttgaccacttagaggccttcgttggaaacgggtttttttgcctgtaaggctagacagaagaattcccagtaatttccttgtgttgtgtgcattcaactcacagagttgaacgttcccttagacagagcagatttgaaacactctatttgtgcaatttgcaagtgtagatttcaagcgctttaaggtcaatggcagaaaaggaaatatcttcatttcaaaactagacagaatcattcccacaaactgcattgtgatgggttcgttcaactcacagagtttaacctttctgttcatagagcagttaggaaacactctgtttgtaaagtctgtaagttgatattcagacctctttgaggccttcgttggaaatggatttcttcatattctgttagacagaagaattctcagaaacttcgttgtgttgtgtgttttcaactcacagagttcaacgatcctttacacagagtagacttgaaacactctttttgtggaattggcagggtggagatttcagccgctttgaggtcaatggaagaaaaggaaatatcttcgtataaaaactagacagagtgattctcagaaactcctttgtgatgtctgtgttcaactcacagagtttaacctttcttttcatagagcagttaggaaacactctgtttgtaaagtctgcaagtggatattcagacctccttgaggccttcgttggaaacgggatttcttcatattctgctatacagaagaattcccagtaacttccttgtgttgtgtgtgttcaactcacagagttgaactttcatttacacagagcagatttgaaacactctttttgtggaatttgcaaatggagatttcaagcgctttgaggccaaaggcagaaaaggaaatatcttcgtagaaaaactagacagaatcattctcagaaactgctgcgtgatgtgtgcgttcaactctcagagtttaacttttcttttcatttagcggtttggaaacactctgtttgtaaagtctgcacgtggatattttgaccacttagaggccttcgttggaaacgggttttttttcatgtaaggctagacagaagaattcccagtaacttccttgtgttgtgtgcattcaactcacagagttgaacgttcccttagacagagcagatttgaaacactctatttgtgcaatttgcaagtgtagatttcaagtgctttcaggtcaatggcagaaaaggaaatatcttcgtttcaaaactagacagaatcattcccacaaactgcgttgtgaggtgttcgttcaactcacagagtttaaactttcttttcatagagcagttaggaaacagtctgtttgtaaattctgtacgtggatattctgacatcttgtggccttcgttggaaacgggatttcttcatattctgctagacagaagaattctcagtaacttccttgtgttgtgtgtattcaactcacagagttgaacgatcgtttacacagagcagacttgaaacactccttttgtggaatttgcaagtggagatttcagccgcgttgaggtcaatggtagaaaaggaaatatcttcgtataaaaactagacagaatgattctcagaaactcctttgtgatgtgtgcgttcaactcacagagtttaacctttcttttcatagagcagttaggaaacactctgtttgtaaagtctgcaagtggatattcagacctgtttgaggccttcgttggaaacgggtttttttcatataaggctagacagaattctcagtaacttccttgtgttgtgtgtgttcaactcacagagttgaactttcatttacacagagcagatttgaaacactctttttgtggaatttgcaagtggagatttcaagcgctttgaggccaaaggcagaaagggaaatatcttcgtataaaaactagacagaatcattctcagaaactgctctgcgatgtgtgcgttcaactctcagagtttaacttttcttttccttcagcagtttggaaacactctgtttgtaaagtctgcacgtggataatttggccacttagaggccttcgttggaaacgggttttttcatgtaaggctagacagaagaattcacagtaacttccttgtgttgtgtgcattcaactcacatagttgaacgttcccttagacagagcagatttgaaacactctatttgtgcaattcgcaactgtagatttcaagcgctttaagatcaatggcagaaaaggaaatatcttcgtttcaaaactagacagaatcattcccacaaactgcgttgtgatgtgttcgttcaactcacagagtttaacctttgtgttcatagagcagttaggaaacactctgtttgtaaagtctgtaagtggatattctgacatcttgtggccttcgttggaaacgggatttcttcatattctgctagacagaataattctcagtaacttccttgtgttgtgtgtattcaactcacagagttgaacgatcctttacagagaggagacttgaaacactctttttgtggaatttgcaagtggagatttcagccgctttgaggtcaatggtagaataggaaatatcttcctatagaaactagacagaataattctcagaaactcctttgtgatgtgtgtgtccaactcacagagtttaacctttcttttcatagagcagttaggaaacactctgtttgtaaagtctgcaagaggatattcagacctctttgaggccttcgttggaaacgggtttttttcatataaggctagacagaataattctcagtaacttccttgtgttgtgtgtattcaactcacagagttgaaggatcctttacagagagcaggcttgaaacacgctttttgtcgaatttgcaagtggagatttcagccgctttgaggtcaatggtagaataggaaatatcttcttatagaaactagacagaatcattctcagaaactgctctgcgatgtgtgcgttcaactctcagagtttaacttttcttttcattcagcagtgtggaaacactctgtttgtaaagtctgcacgtggatattttgaccgcttagaggccttcgttggaaacgggtttttttcctgtaaggctagacagaagaattcccagtaacttccttgtgttgtgtacattcaactcacagagttgaacgttcccttagacagagcagatttgaaacactctttttgtgcaattggcaaatggagatttcaagcgctttaaggtcaatggcagaaaaggaaatatcttcgtttcaaaacgagacagaatcattcccacaaactgcgttgtgatgtgttcgttcaactcacagagtttaacctttctgttcatagagcagttaggaaacactctgtttgtaaagtctgcaagtggatattcagacctccttgaggtcttcgttggaaacgggatttcttcatattctgctagacagaagaattctcagtaacttccttgtgttgtgtgtattcacctcacagagttgaacgatcctttacacagagcagacttgtaacactctttttgtggaatttgcaagtggtgatttcagccgctttgaagtcaaaggtagaaaaggaaatatcttcctataaaaactagacagagtgattctcagaaactcctttgtgatgtctgcgttcaactcacagagtttaaactttcttttcacagagcagttaggaaacactctgtttgtaaagtctgcaagtggatattcagacctccttgaggccttcgttggaaacgggatttcttcatattctgctatacagaagaattcccagtaacttccttgtgttgtgtgtgttcaactcacagagctgaactttcatttacacagagcagatttgaaacactctttttgtggaatttgcaaatggagatttcaagcgctttgaggccaaaggcagaaaaggaaatatcttcgtttcaaaactagacagaatcattctcagaaactgctgcgtgatgtgtgcgttcaactctcagagtttaacttttcttttcattcagcggtttggaaacactgtgtttgtaaagtctgcacgtggatattttgaccacttagaggccttcgttggaaacgggttgttttcatgtaaggctagacagaagaattcccagtaacttccttgtgttgtgtgcattcaactcacagagttgaacgttcccttagacagagcagatttgaaacactctatttgtgcaatttgcaagtgtagatttcaagcgctttaaggtcaatggcagaaaaggaaatatcttcgtttcaaaactagacagaatgattctcagaaacttctttgtgatgtgtgcgttcaactcacagagtttaacctttcttttcatagagcagttaggaaacactctgtttgtaaagtctgcaagtggatattcagacctcttagaggccttcgttggaaacggtatttcttcatactctagacagaagaattctcagtaacttccttgtgttgtgtgctttcaactcacagagttgaacgatcctttacacagagcagattagaaacactctttttgtggaatttgcaagtggagatttcagccgctttgaggtcaatggtagaaaaggaaatatcttcgtatagaaactagacagaatgattctcagaaactcctttgtgatgtgtgcgttcaactcacagagtttaacctttcttttcatagagcagttaggaaacactctgtttgtaatgtctgcaagtggatattcagacatccttgaggctttcgttggaaacgggatttcttcatattctgctagaaagaagaattctcagtaacttccttgtattgtgtgtattcaactgacagagttgaactttcatgtagagagagcagatttgaaacactgtttttgtggaatttgcaagtggagatttcaagcgctttggggccaaaggcagaaaaggaaatatcttcgtataaaactagacagaatcattctcagaaactgctgtgtgatgtgtgcgttcaactctcagagtttaacttttcttttcattcagcggtttggaaacactctgtttgtaaagtttgcacgtggaaattttgaccacttagaggccttcgttggaaacgggtttttttcatgtaaggctcgacagaagaattcccagtaacttccttgtgttgtgtgcattcaactcacagagttgaacgttcccttagacagagcagatttgaaacactctatttgtgcaatttgcaagtgtagatttcaagcgctttaaggtcaatgacagaaaaggaaatattcttcgtttcaaaactagacagaatcattcccacaaactgcgttgtgatgtgatcgttcaactcacagagtttaacctttctgttcatagagcagttaggaaacactctgtttgtaaagtctgtaagtggatattctgacatcttgtggccttcgttggaaacgggatttcttcatattctgctggacagaagaattctcagtaacttccttgtgttgtgtgtattcaactcacagacttgaacgatcctttacagagagcagacttgaaacactctttttgtggaatttgcaagtggagatttcagccgctttgagctcaatggtagaataggaaatatcttcctatagaaactagacagaatgattctcagaaactcctttgtgatgtgtgcgttcaactcacagagtttaacctttcttttcatagagcagttaggaaactctctgcttgtaaagtctgcaagtggatattcagccctctttgaggccttcgttggaaacgggtttttttcatatagggctagacagaagaattcccagtaacttccttgtgttgtgtgtgttcaactcacagagttgaactttgatttacacagagcagattcgaaacactctttttgtggaatttgcaagtggagatttcaagcgctttgaggccaaaggcagaaaaggaaatattcttcgtataaaaactagacagaatcattctcagaaaccgctctgtgatgtgtgcgttcaactctcagagtttaacttttcttttcattcagcagtttggaaacactctgtttgtaaagtctccacgtggatattttgaccacttagaagccttcgttggaaacgtgttttttttcatgtaaggctagacagaagaattcccagtaacttccttttgttgtgtgcattcaactcacagagatgaacgttcccttcgacagagcagatttgaaacactctatttgtgcaatttgcaagtgtagatttaaagcgctttaaggtcaatggcagaaaaggaaatatcttcgtttcaaaactagacagaatcattcccacaaactgcgttgtgatgtgttcgttcaactcacagagtttaacctttctgttcatagagcagtgaggaaacactctgtttgtaaagtctgtaagtggatattctgacatcttgtggccttcgttggaaacgggatttcttcatattctgctagacagaagaattctcagtaacttctttgtgttgtgtgtattcaactcacagagttgaacgatcctttatacagagcagacttgaaacactctttttgtggaatttgcaagtggagatttcagccgctttgaggtcaatggtagaacaggaaatatcttcctatagaaactagacagaatgattctcagaaactcctttgtgatgtgtgcattcaactcacagagtttaacctttcttttcatagagcagttaggaaacactctgtttgtaaagtctgcaagtggatattcagaactccttgaggacttcgttggaaacgggatttctacatattatgctagacagaagaattctcagaaacttccttgggttgtgtgtattcaactcacagagttgaacgatcgtttacacagagcagacttgaaacactctttttgtggaatttgcaagtggagatttcagccgctttgaggtcaatggtagaaaaggaaatatctttgtataaaaactagacagaatgattctcagaaactcctttgtgatgtgtgcgttcaactcacagagtttaacctttcttttcatagagcagttaggaaacactctgcttgtaaagtcttcaagtggatattcagccctctttgaggccttcgttggaaacgggtttttttcatataaggctagacagaagaattcccagtaacttccttgtgttgtgtgtgttcaactcacagagttgaacttccatttacacagagcagatttgaaacactctttttgtggaatttgcaagtggagatttcaagcgctttgaggccaaaggcagaaaaggaaatatctttcgtttcaaaactagacagaatcattctcagaaactgttctgtgatgtgtgcgttcaactctcagagtttaacttttcttttcattcagcagtttggaaacactctgtttgtaaagtctgcacgtggataatttgaccacttagaggccttcgttggaaacgggtttttttcatgtaaggctagacagaagaattcccggtaacttccttgtgttgtgtgtattcaactcacagagttgaacgttcagttagacagagcagatttgaaacactctttttgtgcaatttggaagtggagatttcagccactttgaggtcaatggcaggaaaggaaatatcttcttttcaaaactatacagaatgtttctcagtaagttctttgtgatgtgtgcgttcaactcacagggtttaacctttcttttcatagagcagttagaaagcactctgtttgtaaagtcttcaagtggatattcagacctcttttaggccctcgttggaaacgagatttcttcatattatgctagacagaagaattctcagtaacttccttgtgttgtgtgtattcaacacacagagttgaacgatcctttacacagagcagacttgaaacactctttttgtggaatttgcaagtggagatttcagccgctttgaggtcaatggtagaaaaggaagtatcttcgtataaaaaccagacagaatgattctcagaaactcctttgtgatgtgtgcgttcaactcacagagtttaacctttcttttcatagagcagttagaaaacactctgtttgtaaagtctgcaagtggatattcagacctctttgaggccttcgttagaaacgggatttcttcatattctgctagacagaagaattcccagtaacttccttgtgttgtgtgtgttcaactcacagagttgaactttcatttacacagagcagatttgaaacactctttttgtgaaatttgcaagtggagatttcaagcgctttgaggccaaaggcagaaaaggaaatatcttcgtttcaaaactagacagaatcattctcagaaactgctgtgtgatgtgtgcagttcaactctcagagtttaacttttcttttcattcagcggtttggaaacactctgtttgtaaagtctgcacgtggatattttgaccacttagaggccttcgttggaaacgggattttttcatgtaaggctagacagaagaattcccagtaacttccttgtgttgtgtgcattcaactcacagagacgaacgttcccttagacagagcagatttgaaacactctattggtgtaatttgcaagtgtagatttcaagcgctttaaggtcaatggcagaaaaggaaatatctccgtttcaaaactagacagaatgattctgagaaactcctttgtgatgtgtgcgtacaactcacagagtttaacctttcttttcatagagcagataggaaacactctgtttgtaaagtctgcaagtggatattcagacctccttgaggccttcgttggaaacggcttttcttcctattatgctagacagaagaattctcagtaacttccttgtgttgtgtgtattcaactcacagagttgaatgatcctttacacagagcagacttgaaacactctttttgtggaatttgcaagtggagatttcagccgctttgagttcaatggtagaataggaaaaatcttcctatagaaactagacagaatgattctcagaaacttctttgtgatgtgtgcgttcaactcaccgagtttaacctttcttttcatagatcagttaggaaacactctgtttgtaaactctgcaagtggatattcagacctcttggaggccttcgttggaaacgggatttcttcatactatgctagacagaagaattctcagaaacttccttgtgttgtgtgtattcaactcacagagttgaacgatcctttacacagagcagacttgaaacactctttttgtggaatttgcaagtggagatttcagccgctttgtggtcaatggtagaaaaggaaatatcttcgtatagaaactagacagaatgattctcagaaactcctttgtgatgtgggcgttgaactcacagagtttaacctttcttttcatagagcagttaggaaacactctgtttgtaaagtctgcacatggatattttgaccacttagaggccttcgttggaaacgtgtttttttcatgtaaggctagacagaagaattcccagtaatttccttgtgttgtgtgcagtcaactcacagagttcaacgttcccttagacagagcagatttgaaacactctatttgtgcaatttgcaagtgtagatttcaagcgctttaaggtcaatggcagaaaaggaaatatcttcgtttcaaaactagacagaatcattcccacaaactgcgttgtgatgtgttcgttcaactcacagagtttaacctttcttttcatagagcagttaggaaacactctgttgtaaattctgtaagtggatattctgacatcttggggccttcgttggaaacgggatttcttcatattctgctagacagaataattctcagtaacttccttgtgttgtgtgtattcaactcacagatttgaacgatcctttacagagagcagacttgaaacactctttttgtggaatttgcaagtggagatttcagccgctttgaggtcaatgttagaaaaggaaatatcttcgtataaagactagacagaatgattctcagtaaactcctttgtgatgtgtgtgttcaactcacagtattttaacctttcttttcatagagcagttaggaaacactctgtttgtaaagtctgcaagtggatactcatacctctttgaggccttcgttggaaacgggtttttttcatataaggctagacagaagaattctcagtaacttccttgtgttgtgtgtattcaactgacagagttgaactttcattaagagagagcagatttgaaacactgtttttgtggaatttgcaagtggagatttcaagcgctttggggccaaagcagaaaaggaaatatcttcgtataaaaactagacagaatcgttctcagaaactgctctgcgatgtgtgcgttcaactctcagagtttaacttttcttttcattcagcagtttggaaacactctgtttgtaaagtctgcacgtggataatttgaccacttagaggccttcgttggaaacaggtttttttcatgtaaggctagacagaagaattcccagtaacttccttgtgttgtgtgcattcaactcacagagttgaacgttcccttagacagagcagatttgaaacactctatttgtgcaatttgcaagtgtagatttcaagcgcattaaggtcaatggcagaaaaggaaatatcttcgtttcaaaattagacagaatcattcccacaaactgcgttgtgatgtgttcgttcaactcacagagtttaacctttctgttcatagagcagttaggaaacactctgtttgtaaagtctgcaagtggatattcagacctccttgaggccttcgttggaagcgggatttcttcatattctgctagacagaagaattcccagtaacttccttgtgttgtgtgtgttcaactcacagagttgaactttcatttacacagagcagatttgaaacactctttttgtggaatttgcaaatggagttttcagccgcgttgaggtcaatggtagaaaaggaaatatcttcgtttcaaaactagacagaatgattctcagaaactcctttgtgatgtgtctgttcaactcacagagtttaacatttcttttcatagagcagttaggaaacactctgtttgtaaagtctgcaagtggatattcagacctctttgaggccttcgttggaaacgggtttttttcatataaggctagacagaagaattctcagtaacttccttgtgttgtgtgtattcaactgacagagatgaactttcatttagagagagcagatttgaaacactgtttttgtggaatttgcaagtggtgatttcaagcgctttggggccaaaggcagaaaaggaaatatcttcgtataaaaactagacagaatcattctaagaaactgctctgcgatgtgtgtgttcaactctcagagtttaacttttcttttccttcagcagtttggaaacactctgtttgtaaagtctgcacgtggataatttgaccacttagaggccttcgttagaaacgggtttttttcatgtaaggctagacagaagaattcccggtaacttctttgtgttgtgtgcattcaactcacagagttgaacgttcctttagacagagcagatttgaaacactctttttgtgcaatttgcaagtggagatttcaagcgctttaaggtcaatggcagaaaaggaaataacttcgtttcaaaactagacagtatcattcccacaaactgcgttgtgatgtgttcgctcaactcacagagtttaacctttcttttcatagagcagttaggaaacagtctgtttgtaaattctgtaagtggatattctgacatcttgtggccttcgttggaaacgggatttcttcatattctgctagacagaagaattctcagtaacttcccttgtgttgtgtgtattcaactcacagagttgaacgatcctttacagagagcagacttgaaacactctttttgtggaatttgcaagtggagatttcagccgctttgaggtcaatggtagaaaaggaaatatcttcctataaagactagacagaatgattctcagaaactcctttgtgatgtgtgcgttcaactcacagagttcaacctttcttttcatagagcagttgggaaacgctctgtttgtaaagtctgcaaatggatattcagacttctttgaggccttcgttggaagcaggatttcttcatattctgctagacagaagaattctcagtaacttccttgttttgtgtgtattcaactgacagagttgaactttcgtttagagagagcagatttgaaacactgtttttgtggaatttgcaagtggagatttcaagcgctttggggccaaaggcagaaaaggaaatatcttcgtataaaaactagacagaatcattctcagaaaatgctttgtgatgtgtgcgttcaactctcagagtttaacttttgttttcattcagcagtttggaaacactctgtttgtaaagtctgcacgtggatattttgaccacttagaggccttcgttggaaacgggtttttttcatgtaagggtagacagaagaattcccagtaacttccttgtgttgtgtgcattcaactcacagagttgaacattcccttagacagagcagatttgaaacacactatttgtgcaatttgcaagtgtagatttcaagcgctttaaggtcaatggcagaaaaggaaatatcttcgtttcaaaactagacagaatgattctcagaaactcctttgtgatgtgtgcgttcaactcacatagttgaacctttcttttcatagagcagttaggaaacactctgtttgtaaagtctgtaagtggatattcagacatctttgaggctttcgttggaaacgggatttcttcatattctgctatacagaagaattctcagtaacttccttgtgttgtgtttattcaactcacaggagttgaatgatcctttacacagcagcagacttgaaacactctttttgtggaatttgcaagtggagatttcagccgctttgtggtcaatggtagaaaaggaaatatcttcgtataaagactagacagaatgattctcagaaactcctttgtgatgtgtgcgttcaactcacagagtttaacctttcttttcatagagcagttaggaaacactctgtttgtaaagtctgcaagtggatattcagacctctttgaggccttcgttggaaacgggatttcttcatattctgctggacagaagaattctcagtaactttccttgtgttgtgtgtattcaactcacagagttgaacgatcctttacacagagcagacttcaaacactctttttgtggaatttgcaagtggagatttcagccgctttgaggtcaatagtagaaaaggaaatatcttcgtagaaaaactaggcagaaatcattctcagaaactgctctgcgatgtgtgcgttcaactctcaggagtttaacttttcttttcattcagcagtttggaaacactctgtttgtaaagtctgcacgtggatattttgaccacttagaggccttcgttggaaacgggtttttttcctgtaaggctagacagaagaattcccagtaacttccttgtgttgtgtacattcatctcacagagttgaacgttcccttagacagagcagatttgaaacactctttttgtgcaattggcaaatggagatttcaagcgctttaaggtcaatggcagaaaaggaaatatcttcgtttcaaaactagacagaatcattcccacaaactgcgttgtgatgtgttcgttcaactaacagagtttaacctttcttttcatagagcagttaggaaacagtctgtttgtaaattctgtatgtggatattctgacatcttgtggccttcgttggaaacgggatttcttcatattctgcttgacagaagaattctcagaatcttccttgtgttgtgtgtattcaactcacagagttgaatgatggtttacacagagcagatttgaaacactcatttggtggaatttgcaagtggagatttcagccgctttgaggtcaatggtagaaaaagaaatatcttcgtataacaactagacagaatgattctcagaaactcctttgtgatgtgtgcgttcaactcacagagtttaacctttcttttcatagagcagttaggaaacactctttctgaaaagtctgcaagtggatattcagacctctttgaggccttcgttggaaacgggatttcttcatattctgctagacagaggaattcccagtaacttccttgtgttgtgtgtgttcaactcacagagttgaactttcatttacacagagcagatttgaaacactctttttgtggaatttgcaagtggagatttcaagcgctttgaggccaaaggcagaaaaggaaatatcttcgtttcaaaactagacagaatcattctcagaaactgctgcatgatgtgtgcgttcaactctcagagtttaacttttcttttcattcagcggtttggaaacactctgtttgtaaagtctgcacgtggatattttgaccacttagaggccttcgttggaaacaggttttttgcatgtaaggctagacagaagaatttccagtaaattccttgtgttgtgtacattcaactcacagagttgaacgttcccttagacagagcagatttgaaacactctttttgtgcaattggcaagtggagatttcaagcgctttaaggtcaatggcagaaaaggaaatatcttcgtttcaaaactagacagaatcattcccacaaactgcgttgtgatgtgttcgttcaactcacagagtttaacctttctgttcatagagcagttaggaaacactctgtttgtaaagtctgcaagtggatattcagacctctttgaggccttcgttggaaacgggatttcttcatattctgctagacagaagaattctcagaatcttccttgtgttgtgtgtattcaactcacagagttgaacgatcctttacacagagcagacttgatgcactctttttgtggaatttgcaagtggagatttcagccgctttgaggtccatggtagaaaaggaaatatcttcgtataaaaactagacagaatgattctcagaaacttctttgtgatgtgtgcgttcaactaacagagtttaacatttcttttcatagagcagttaggaaacactctgtttgtaaactctgcaagtggatattcagacctctttgaggccttcgttggaaacgggatttcttcatactgtgctagacagaaggattcccagtaacttccttgtgttgtgtgtgttcaactcacagagttgaactttcatttacaatgagcagatttgaaacactctttttgtggaatttgcaagtggagatttcaagcgctttgaggccaaaggcagaaaaggaaatatcttcgtataaaaactagacagaatcattctcagaaactgctctgcgatgtgtgcgttcaactctcagagtttaacttttcttttcattcagcagtttggaaacactctgtttgtaaagtctgcacgtgcataatttgaccacttagaggccttcgttggaaacaggtttttttcatgtaaggctagacagaagattcccagtaacttccttgtgttgtgtacattcaactcacagagttgaacgttcccttagacagagcagatttgaaacactctttttgtgcaattggcaaatggagatttcaagcgctttaaggtcaatggcagaaaaggaaatatcttcgtttcaaaactagacagaatcattcccacaaactgcgttgtgatgtgttcgttcaactcacagggtttaacctttctattcatagagcagttaggaaacactctgtttgtaaagtctgtaagtggatattctgacatcttgtggccttcgttggaaacgggatttcttcacattctgctagacagaagaattctcagtaacttccttgtgttgtgtttattcaactcacagagttgaatgatcctttacacagagcagacttgaaacactgtttttgtggaatttgcaagtggagatttcagccgctttgaagtcaatggtagaaaagtaaatatcttcgtataaagactagacagaatgattctcagaaacttcattgtgatgtgtgcgttcaactcacagagtttaacctttcttttcatagagcagttaggaaacactctgtttgtaaactctgcaagtggatattcagacctctttgaggccttcgttggaaacgggttttttcatgtaaggctagacagaagaattcccagtaacttccttgtgttgtgtgtgttcaactcacagagttgaactttcagttacacagagcagatttgaaacactctttttgtggactttgcaaatggagatttcaagcgctttgaggccaaaggcagaaatggaaatatcttcgtataaaaactagacagaatcattctcagaaactgctctgcgatgtgtgcgttcaactctcagagtttaacttttcttttcattcagcagtttggaaacactctgtttgtaaagtctgcacgtggataacttgaccacttagaggccttcgttggaaacgggtttttttcctgtaaggctagacagaagaattcccagtaacttccttgtgttgtgtgcattcaactcacagagttgaacgttcccttagacagagcagatttgaaacactctatttctgcaatttgcaagtgtagttttcaagcactttaaggtcaacggcagaaaaggaaatatcttcgtttcaaaactagacagaatcattcccacaaactgcgttgtgatgtgctcgttcatctcacagagtttaacctttcttttcatagagcagtttggaaacagtctgtttgtaaattctgtaagtggatattctgacatcttgtggccttcgttggaaacgggatttcttcatattctgctagacagaagaattctcagtaacttccttgtgttgtgtgtattcaactcacagagttcaacgatcctttacacagagcagacttgaaacactctttttgtggaatttgcaagtggagatttcagccgctttgaggtcaatggtagaaaaggaaatatcttcgtataaaaactagacagaatgattctcagaaactcctttgtgatgtgtgcgttcaactcacagagtttaacctttcttttcatagagcagttgggaaacactctgtttgtaaagtctgcaagtggatattcagacttcctttgaggccttcgttggaagcgggatttcttcatgttctgctagacagaagaattcccagtaacttccttctgttgtgtgtgttcaactcacagagttgaactttcatttacacagagcagatttgaaaaactctttttgtggaatttgcaagtggagatttcaagcgctttgaggccaaaggcagaaaaggaaatatcttcgtataaaaactagacagaatcattcttagaaactgctctgcgatgtgtgtgttcaactctcagagtttaacttttcttttcattcagcagtttggaaacactctgtttgtaaagtctgcacgtggatattttcaccacttagaggccttcgttggaaacgggtttttttcctgtaaggctagacagaagaattcccagtaacttccttgtgttgtgtgcattcaactcacaaagttgaacgttcccttagacagagcagatttgaaacactctatttgtgcaatttgcaagtgtagatttcaagcgctttaaggtcaacggcagaaaaggaaatatcttcgtttcaaaactagacagaatcattcccacaaactgcgttgtgatgtgctcgttcaactcacagagtttaacctttcttttcatagagtagttaggaaacagtctgtttgaaaattctgtaagtggatattctgacatcttgtggccttcgttggaaacgggatttcttcatattctgctagacagaagaattctcagtaacttcccttgtgttgtgtgtattcaactcacagagttgaacgatcctttacacagagcagacttgaaacactctttttgtggaatttgcaagaggagatttcagccgctttgaggtcaatagtagaaaaggaaatatcttcgtagaaaaactagacagaatgattctcagaaactcctttgtgatgtgtgcgttcaactcacagagtttaacctttcttttcatagagcagttaggaaacactctgtttgtaaagtctgcaagtggatattcagacctctttgaggccttcgttggaaacgggtttttgtcatataaggctagacagaagaattctcagtaacttccttgtgttgtgtgtattcaactgacagggttgaactttcatttagagagagcagatttgaaacactgtttttgtggaatttgcaagtggagatttcaggcgccttggggccaaaggcagaaaaggaaatatcttggtataaaaactagacagaatcattctcagaaactgctgcgtgatgtgtgcgttcaactctcagagtttaacttttcttttcattcagcggtttggaaacactctgtttgtaaagactgcacgtggatattttgaccacttagaggccttcgttggaaacgggttttcttcatgtaaggctagacagaagaattctcagtaacttccttgtgttgtgtttattcaactcacagagttgaatgatcctttacacagagcagacttgaaacactctttttgtggaatttgtaagtggagatttcagccgctttgaagtcaatggtagaaaagtaaatatcttcgtataaagactggacagaatgattctcagaaactcctttgtgatgtgtgcgttcaactcacagagtttaacctttctgttcatagagcagttaggaaacactctgtttgtaaagtctgtaagtggatattctgacatcttgtggccttcgttggaaacgggatttcttcatattctgctagacagaataattctcagtaacttccttgtgttgtgtgtattcaactcacagagttgaacgatcctttacagagagcagacttgaaacactctttttgtggaatttgcaagtggagatttcagccgctttgaggtcaaaggtagaataggaaatatcttcctatagaaactagacagaatgattctcataaactcctttgtgatgtgtgcgttcaactcacagagtttaacctttcttttcatagagcagttaggaaacactctgtttgtaaagtctgcaagtggatattcagacctctttgaggccttcgttggaaacgggatttcttcatattctgctagacggaagaattctcagtaacttccttgtgttgtgtgtattcaactgactgaattgaactttcatttagagagagcagatttgaaacactgtttttgtggaatttgcaagtggagatttcaagcgctttggggccaaaggcagaaaaggaaatatcttcgtataaaaactagacagaatcattctcagaaactgctctgcgatgtgtgcgttcaactctcagagtttaacttttcttttcattcagcagtttggaaacactctgtttgtaaagtctgcacgtggataatttgaccacttagaggccttcgttagaaacgggtttttttcatgtaaggctagacagaagaattcccagtaacttccttgtgttgtgtgcattcaactcacagagttgaacgttcccttagacagagcatatttgaaacactctatttgtgcaatttgcaagtgtagatttcaagcgctttaaggtcaatggcagaaaaggaaatatcttcgtttcaaaactagacagaatcattcccacaaactgcgttgtgatgtgttcgctcaactcgcagagtttaacgtttcttttcatagagcagttaggaaacagtctgtttgtaaattctgtaagtggatattctgacatcttgtggccttagttggaaacgggatttcttcatattctgctagacagaagaattctcagaaacttccttgtgttgtgtgtattcaactcacagagttgaacgatcctttacacagagcagacttgaaacacactttttttggtattttcaagtggagatttcagccaatttgaggtaaatggtagaaaaggaaatatcttcgtataaaaactagacagagtgattctcagaaactcctttgtgatgtctgcgttcaactcacagagtttaacctttcttttcatagagcagttaggaaacactctgtttgtaaagtctgcaggtggatattcagacctccttgaggccttcgttggaaacgggatttcttcatattctgctatacagaagaattcccagtaacttccttgttttgtgtgtgttcaactcacagagttgaactttcatttacacagagcagatttgaaacactctttttgtggaatttgcaaatggagatttcaagcgctttgaggccaaaggcagaaaaggaaatatcttcgtataaaaactagacagaatcattctcagaaactgctctgcgatgtgtgcgttcaactctcagagtttaactttgcttttcattcagcagtttggaaacactctgtttgtaaaatctgcacgtggataatttgaccacttagaggccttcgttggaaacgggtttttttcatgtaaggctagacagaagaattcccagtaacttccttctgttgcgtacattcagctcacagagttgaacgttcccttagacagagcagatttgaaacactctttttgtgcaattggcaagtggagatttcaagcgctttaaggtcagtggcagaaaaggaaatatcttcgtttcaaaactagacagaatgattctcataaactcctttgtgatgtgtgcgttcaactcacagagtttaacctttcttttcatagagcagttaggaaacactctgcttgtaaagtctgcaagtggatattcagacctccttgaggccttcgttggaaacgggatttcttcatattctgctagacagaagaattctcagtaacttccttgtgttgtgtgtattcaactcacagagttgaacgatcctttacacagagcagacttgaaaccctctttttgtggaatttgcaagtggagatttcagccgctttgaggtcaatggtagaaaaggaaactatcttcgtataaagactagacagagtgattctcagaaactcctttgtgatgtctgcgttcaactcacagagcttaacctttcttttcatagagcagttaagaaacactctgtttgtaaagtctgcaagtggatattcagacctccttgaggccttcgttggaaacgggatttcttcatattctgctatacagaagaattctcagaaacttccttgtgttgtgtgttttcaactcacagagttcaacgatcctttacacagagtagacttgaaacactctttttgtggaattggcagggtggagatttcagccgctttgaggtcaatggtagaaaaggaaatatcttcgtataaaaactagacagaatgattctcagaaactcctttgtgatgtgtgcgttcaactcgcatagtttaacctttcttttcatagagcagttaggaaacactctgtttgtaatgtctgcacgtggatatttggacttctttgaggccttcgttggaaacgggttttttccatgtaaggctagacagaagaattcccagtaacttccttgtgttgtgtacattcaactcacagagttgaacgttcccttagacagagcagatttgaaacactctttttgtgcaattggcaagtggagatttcaagcgctttaaggtcaatggcagaaaacgaaatatcttcgtttcaaaactacacagaatcattcccacaaacggcgttgtgatgtgttcgttcaactcacagagtttaacctttctgttcatagagcagttaggaaacactgtttgtaaagtctgtaagtggatattctgacatcgtgtggccttcgttggaaacgggatttcttcatattctgctagacagaataattctcagtaacttccttgtgttgtgtgtattcaactcacagagttgaacgatcctttacacagagcagacttgaaacattctttttgtggaatttgcaactggagatttcagccgctttgaggtcaattgtagaataggaaatatcttcctatagaaactagacagaatgattctaagaaactcctttgtgatgtgtgtgttcaactcacagagattaacctttcttttcatagagcagttagtaaacactctgtttataaagtctgcaagtggatattcagacccctttgaggccttcgttggaaacgggatttcttcatattatgctagacagaagaattctcagtaacttccttgtgttgtgtgtattcaactgacagagttgaactttcatttagagagagcagatttgaaacactgtttttgtggaatttgcaagtggagatttcaagcgctttggggccaaaggcagaaaaggaaatatcttcgtatgaaaactagacagaatcattctcagaaactgctctgtgatgtgtgcgttccactctcagagtttaacttttcttttcattcagcagtatggaaacactctgtttgtaaagtctgcacgtggatgttttgaccacttagtggccttcgttggaaacgggtttttttcatgtaaggctagacagaagaattctcagtaacttccttgtgttgtgtgtattcaactcacagagttgaatgatcctttacacagagcagacttgtaacactatttttgtggaatttgcaagtggagatttcagccactttgaagtcaaagtagaaaaggaaataacttcctataaaaactagacagaatcattcccacaaactgcgttgtgatgtgtttgttcaactctcagagtttaacctttctgttcatagagcagttaggaaacactctgtttgtaaagtctgcaagtggatattctgacatcttgttgccttcgttggaaacgggatttcttcatattctgctagacagaagaattctcagaatcttccatgtgttgtgtgtattcaactcacagagttgaacgatcctttacacagagcagacttgaaacactctttttgtggaatttgcaagtggagatttcagccgctttgaggtccatggtagaaaaggaaatatcttcgtataaaaactagacagaatgattctcagaaactcctttgtgatgtgtgtctgcaactcacagagtttaacctttcttttcatagagcagttagtaaacactctgtttataaagtctgcaagtggatattcagaccccttttaggccctcgttggaaacgggatttcttcatattctgccagacagaagaattcccagtaacttccttgtgttgtgtgtgttcaactcacagagttgaactttcatttacacagagcagatttgaaacactctttttgtggaatttgcaagtggagatttcaagcgctttgaggccaaatgcagaaaaggaaatatcttcgtttcaaaactagacagaaatcattctcagaaactgctgtgtgatgtgtgcgttcaactctcagagtttaacttttcttttcattcagcggtttggaaacactctgtttgtaaagtctgcacgtggaaattttgaccacttagaggccttcgttggaaacgggtttttttcatgtaaggctcgacagaagaattcccagtaacttccttgtgttgtgtacattcaactcacagagttgaacgttcccttagacagagcagatttgaaacactctttttgtgcaattggcaagtggtgatttcagccgctttgaggtcaatggtagaaaaggaaatatcttcgtataaaaactagacagaatcattcccacaaactgcgttgtgatgtgttcgttcaactcacagagtttaacctttcttttcatagagcagttaggaaacactctgttggtaaattctgtaagtggatattctgacatcttgtggcctccgttggaaacgggatttcttcatattctgctagacagaagaattctcagtaacttccttgtgttgtatgtattcaactcacagagttgaacgatcctttacacagagcagacttgaaacactctttttgtggaatttgcaagtggagatttcagccgctttgaggtcaatggtagaataggaaatatcttcctatagaaactagacagaatgattctcagaaacacctttgtgatgtgtgcgttcaactcacagagtttaacttttcttttcatagagcagttaggaaacactctgtttgtaaagtctgcaagtggatattcagacctctttgaggccttcgttggaaacgggatttcttcatattctgctagacagaagaattctcagtaacttccttgtgttgtgtgtattcaactcacagagttgaatgatcctttacacagaacagacttgaaacactcttgttgtggaatttgcaagtggagaattcaggcgctttgaggtcaacggtagaataggaaatatcttcctatagaaactagacagaatcattctcagaaactgctctgtgatgtgtgcgttcaactctcagagtttaacttttcttttcattcagcagtttggaaacactctgtttgtaaagtctgcacgtggatattttgaccacttagaggccttcgttggaaacgggtttttttcctgtaaggctagacagaagaattctcagtaacttccttgtgttgtgtacattcaactcacagagttgaacgttcccttagacagagcagatttgaaacactctttttgtgcaattggcaaatggagatttcaagcgctttaaggtcaatggcagaaaaggaaatatcttcgtttcaaaactagacagaatgattctcagaaactcctttgtgatgtgtgcgttcaactcacagagtttaacctttcttttcatagagcagttaggaaacactctgtttgtgaagtctgcaagtggatattcagacctctttgaggcctttgttggaaacgggatttcttcatattctgctagacagaagaattctcagaaacttcctggtgttgtgtgttttcaactcacagagttcaacgatcctttacacagagtagacttgaaacactctttttgttgaattggcaagtggagatttcagccgctttgaggtcaatggtagaaaaggaaatatcttcgtataaaaactagacagagtgattctcagaaactcctttgtgatgtctgcgttcaactcacagagtttaacctttcttttcatagagcagttaggaaacactccgtttgtaaagtctgcaagtggatattcagacctccttgaggccttcattggaaaccggatttcttcatattttgctatacagaagaattctcagtaacttccttgtgttgtgtgtattcaactgacagagttgaactttcatttagagagagcagatttgaaacactgtttttgtggaatttgcaaggggagatttcaagcgctttggggccaaaggcagaaaaggaaatatcttcgtataaaaactagacagaatcattctcagaaactgctctgcgatgtgtgcgttcaactctcagagtttaacttctcttttcattcagtagtttggaaaaactctgtttgtaaagtctgcacgtggataacttgaccacttagaggccttcgttggaaacgggtttttttcatgtaaggctagacagaagaattctcagtaacttccttgtgttgtgtgtattcaactgacagagttgaacgatcctttacacagagcatacttgaaacactcttcttgtggaatttgcaagtggagatttcagccgctttgaggtcaatggtagaataggaaatatcttcgtataaaaagtagacagaatgattctcagaaactcctttgtgatgtgtgcgttcaaatcacagagtttaacctttcttttcatagagcagttagggaacactctgtttgtaaagtctgcaagtggatattcagacctccttgaggccttcgttggaaacgggatttcttcatattctgctagacagaagaattctcagtaacttccttgtgttgtgtgtattcaactcacagatttgaacgatcctttacacagagcagacttgaaacactctttttgtggaatttgcaagtggagatttctgacgctttgaggtcaatggtagaataggaaatatcttcctatagaaactagacagaatgattctgagaaactcctttgtgatgtgtgcgttcaactcacagagtttaacctttcttttcatagagcagttaggaaacactctgtttgtaaagtgtgcaagtggatattcagaactccttgaggccttcgttggaaacgggatttcttcatattatgctagacagaagaattcccagtaacttccttctgttgtgtgtgttcaactcacagagttgaactttgatttacacagagcagatttgaaacactctttttgtggaatttgcaagtggagatttcaagcgctttgaggccaaaggcagaaaaggaaatatcttcgtataaaaactagacagaatcattctcagaaactgctctgcgatgtgtgcgttcaactctcagagcttaacttttcttttcattcagcagtttggaaacactctgtttctaaagtctgcacgtggataacttgaccacttagaggccttcgttggaaacgggtttttttcctgtaaggctagacagaagaattcccagtaacttccttgtgttgtgtacattcaacacacagagttgaacgttcccttagacagagcagatttgaaacactcttttagtgcaattggcaactggagatttcaagcgatttaaggtcaatggcagaaaagtaaatatcttcgtttcaaaactagacagaatcattgccacaaactgcgttgtgatgtgttcgttcaacccacagagtttaacctttctgttcatagagcagttaggaaacactctgtttgtaaagtatgaaagtggatattctgacatgttgtggccttcgttggaaacgggatttcttcatattctgctagacagaagaattctcagaaacttccttgtgttgtgtgttttcaactcacagagttgaacgatcctttacacagagcagacttgaaacactctttttgtggaatttgcaagtggagatttcagccgctgtgaggtcaatggtagaataggaaatatcttcctatagaaactagacagaatgattctcagaaactcctttgtgatgtgtgtgttcaactcacagagtttaacctttcttttcatacagcagttaggaaacactctgtttgtaaattctgcaagtggatattttgaccgctttgaggccttcgttggaaacgggtttttttcatgtaaggctagacagaagaattcccagtaacttccttgtgttgtgtgtgttcaactcacagagttgaactttcatttacccagagcagatttgaaacactctttttgtggaatttgcaagtggagatttcaagcactttgaggccaaaggcagaaaaggaaatatcttcgtttcaaaactagacagaatcattctcagaaactgctctgcgatgtgtccgttcaactctcagagtttaacttttcttttcattcagcagtttggaaacactctgtttgtaaagtctgcacgtggatattttgaccacttagaggccttcgttggaaacgggtttttttcctgtaaggctagacagaagaattcccagtaacttccttgtgttgtgtacattcaactcacagagttgaacgttcccttagacagagcagatttgaaacactctttttgtgcaattggcaagtggagatttcaagcgctttgaggtcaatggcagaaaaggaaatatcttcgtttcaaaactagacagaatcattcccacaaactgcgttgtgatgtgttcgttctactcacagagtttaacctttcttttcatagagcagttaggaaacagtctgtttgaaaattctgtaaggggatattctgacatcttgtggccttcgttggaaacgggatttcttcatattctgctagacagaagaactcccagtaacttccttgtgttgtgtgtgttcaactcacagagttgaactttcatttacacagagcagatttgaaacactctttttgtggaatttgcaaatggagatttcagccgcgttgaggtcaatggtagaaaaggaaatattcttcgtttcaaaactagacagaatgattctcagaaactcctttgtgatgtgtgcgttcaactcacagagtttaacctttcttttcatagaccagttaggaaacactctgtttgtaaagtctgcaagtggatattcagacctccttgaggccttcgttggaagcgggatttcttcatgttctgctagacagaagaattctcagaaacttccttgtgttgtgtgttttcaactcacagagttgaacgatcctttacacagagcagacttgaaacactctttttgtggtatttgcaagtggagatttcagccgctttgagttcaatggtagaataggaaatatcttcctatagaaactagacagaatcattcccacaaactgcgttgtgatgtgttcgttcaactcacagagtttaacctttgttttcagagaggagttaggaaactgtctgtttgtaaattctgtaagtggatattctgaaatcttgtggccttcgttggaaacgggatttcttcatattctgctagacagaagaattctcagaatcttccttgtgttgtgtgtattcaactcacagagtttaacgatggtttacacagagcggatttgaaacactctttttgtggaatttgcaagtggagatttcagccgctttgaggtcaatggtagaaaaggaaatatcttcgtataaaaactagacagaatgattctcagaaacttctttgtgatgtgtgcgttcaactcacagagtttaacctttcttttcatagagcagttaggaaacactctgtttgtaaactctgcaagtggatattcagacctctttgaggccttctttggaaacgggatttcttcatactgtgctagacagaagaattctcagtaacttccttgtgttgtgtgtattcatctcacagagttgaacgatcctttacacagagcggacttgaaacactcttttgatggaatttgcaagtggagatttcagccgcgttgaggtcaatggtagaaaaggaaatatcttcgtataaaaactagacagaatgattctcagaaacttctttgtgatgtgtgcgttcaactcacagagtttaacctttcttttcatagagcagttaggaaacactctgtttgtaaactctgcaagtggatattcaaacctctttgaggccttcgttggaaacgggatttcttcatactatgctagacagaagaattcccagtaacttccttgtgttgtgtgtgttcaactcacagagttgaactttcatttacacagagcagatttgcaacactctttttgtggaatttgcaaatggagatttcaagcgctttgaggccaaagccagaaaaggaaatatcttcgtttcaaaactagacagaatcattctcagaaactactgcgtgatgtgtgcgttcaactctcagagtttaacttttcttttcattcagcggtttggaaacactctgtttgtaaagtctgcacgtggatattttgaccacttagaggccttcgttggaaacgggtttttttcatgtaaggctagacagaagaattctcagaaactcccttgtgtggtgtgtattcaactgacagggttgaactttcatttagacagagcagatttgaaaccctctttatgtggaattggcaagtggagatttcaagcgctttgagaccaaaggcagaaaaggaaatatcttcgtttcaaaactagacagaatcattcccacaaactgcgttgtgatgtgttcgttcaactcacagggtttaacctttcttttcatagagcagttaggaaacactctgtttgtaaagtctgtaaggggatattctgacatcttgtggccttcgttagaaacgggatttcttcatattctgctagacacaagaactctcagtaacttccttgtgttgtgtgtattcaactcacagagttgaacgatcctttacacagagcagacttgaaacattcttttcgtggaatttgcaactggagatttcagccgctttgaggtcaatggtagaataggaaatatcttcctatagaaactagacagaacgattctcagaaactcctttgtgatgtgtgcgttcaactcacagagtttaaactttcttttcatagagcagttaggaaacactctgtttgtaaagtctgcaagtggatattcagacctctttgaggccttcgttggaaacgggatttcttcatattctgctagacagaagaattctcagtaacttccttgtgttgtgtgtattcaactgacagagttgaactttcatttagagagagcagatttgaaacactgtttttgtggaatttgcaagtggagatttcaagcgctttgggaccaaaggcagaaaaggaaatatcttcgtataaaaactagacagaatcattctcagaaactgctctgcgatgtgtgcgttcaactctcagagtttaacttttcttttcattcagcagtttggaaacactctggttgtaaagtctgcacttggataacttgaccacttagaggacttcgttggaaacgggtttttttcctgtaaggctagacagaagaattcccagtaacttccttgtgttgtgtgcattcaactcacagacttgaacgttcccttagacagagcagatttgaaacactctatttgtgcaatttgcaagtgtagatttcaagcgctttatggtcaacggcagaaaaggaaatatcttcgtttcaaaactagacagaatgattctcagaaactcctttgtgatgtgtgcgttcaactcacagagtttaacctttcttttcatagagcagttaggaaacactctgtttgtaaagtgtgcaagtggatattcagacctccttgaggccttcgttggaaacgggatttcttcatattatgctagacagaagaattctcagtaagttccttgtgttgtgtgtattcaactcacagagttgaacgatcctttacacagagcagacttgaaacactctttttgtggaatttgcaagtggagatttcagccgctttgaggtcaatggtagaataggaaatatcttcctatagaaactagacagaatgattctcagaaactcctttgtgatgtgtgcgttcaactcacagagtttaacctttctttacatagagcagttaggaaacactcagtttgtaaagtctgcaagaggatattcagacatctttgaggctttcgttggaaacgggatttcttcatattctgctagagagaaagaattcccagtaacttccttgtgttgtgtgtgttcaactcacagagttgaactttcatttacacagagcagattggaaacactctttttgtggaatttgcaagtggagattgcaagcgctttgaggccaaaggcagaaaaggaaatatcttcgtataaaaactagacagaatcattctcagaaactgctctgcgatgtgtgcgttcaactctcagagtttaactttgcttttcattcagcagtttggaaacactctgtttgtaaagtctgcacgtggatattttgaccacttagaggccttcgttggaaacggttttctttcctgtaaggctagacagaagaattcccagtaacttccttgtgttgtgtacattcaactcacagagttgaacgttcccttagacagagcagatttgaaacactctttttgtgcaattggcaagtggagatttcaagcgctttaaggtcaatggcagaaaaggaaatatcttcgtttcaaaactagacagaatcattcccacaaactgcgttgtgatgtgttcgttcaactcacagagtttaacctttctgttcatagagcagttaggaaacactctgtttgtaaagtctgtaagtggatattctgacatcttgtggcctttgttggaaacgggatttcttcatattctgctagacagaagaattctcagtaacttccttgtgttgtgtgtattcaactcatagagttgaacgatcccttacacagagcagacttgtaacactctttttgtggaatttgcaagtggagatttcacccgctttgacgtcaaaggtagaaaaggaaatatcttcctataaaaactagacagaatgattctcagaaactcctttgtgatgtgtgcgttcaactcacagagtttaacttttcttttcatagagcagttaggaaacactctgtttataaagtctgcaagtggatattcagacctctttgaggccttcgttggaaacgggatttcttcatattatgctagacagaagaattcccagtaacttccttgtgttgtgtgtgttcaactcacagagtttaactttcatttacccagagcagatttgaaacactctttttgtggaatttgcaagtggagatttcaagcgctttgaggccaaaggcagaaaaggaaatatcttcgtttcaaaactagacagaatcattctcagaaactgctgcgtgatgtgtgcgttcaactctcagagtttaacttttcttttcattcagcggtttggaaacactctgtttgtaaagtctgcacgtggaaattttgaccacttagaggccttcgttggaaacgggtttttttcatgtaaggccagacagaagaattcccagtaacttccttgtgttgtgtacattcaactcacagagttgaacgttcccttagacagagcagatttgaaacactctttttgtgcaattggcaagtggagatttcaagcgctttaaggtcaaagcagaaaaggaaatatcttcgtttcaaaactagacagaatcattcccacaaactgcgttgtgatgtgttcgttcaactcacagagtttaacctttcttttcatagagcagttaggaaacagtctgtttgtcaattctgtaagtggatattctgacatcttgtggccttcgttggaaaagggatttcttcatattctgctagacagaagaattctcagtaacttccttgtgttgtgggtattcaactcacagagttgaacgatcctttacacagagcagacttggaacactctttttgtggaatttgcaagtggagatttcagccgcgttgaggtcaatggtagaaaaggaaatatcttcgtataaaaactagacagaatgattgtcagaaactccttggtgctgtgtgcgttcaactcacagagtttaaagtttcttttcatagagcagttaggaaacactctgtttgtaatgtctgcaggtggatattcagacatcattgaggctttttttggaaacgggatttcttcatattctgctatatagaagaattctcagtaacttccttgtgttgtgtgtattcaactcacagagttgaacgatcctttacacagagcagacttgaaacactctttttgtggaatttgcaagtggagatttcagccgctttgaggtctatagtagaaaaggaaatatcttcgtagaaaaactagacagaatgattctcagaaactcctttgtgatgtgtgcgttcaactcacagagtttaacctttcttttcatagagcagttaggaaacactctgtttgtaaagtctgcaggtagatattcagacatctttgaggctttcgttggaaacgggatttcttcatattctgctagacagaagaattcccagtaaattccttgtgttgtgtgtgttcaactcacagagttgaactttcatttacacagagcagatttgaaacactctttttgtggaatttgcaagtggagatttcaagcgctttgaggccaaaggcagaaaaggaaatatcttcgtttcaaaactagacagaatcattctcagaaactgctgcgtgatgtgtgcgttcaactctcagagtttaacttttcttttcattcagcggtttggaaacactctgtttgtaaagtctgcacgtggaaattttgaccacttagaggccttcgttggaaacgggtttttttcatgtaaggcttgacagaagaattcccagtaacttccttgtgttgtgtgcattcaactcacagagttgaacgttcccttagacagagcagatttgaaacactctatttgtgcaatttgcaagtgtagatttcaagcgctttaaggtcaacggcagaaaaggaaatatcttcgtttcaaaactagacagaatgattctcagaaacttcattgtgatgtgtgcgttcaactcacagagtttaacctttcttttcatagagcagttgggaaacagtctgtttgtaaattctgtaagtggatattctgacatcttgtggccttcgttggaaacgggatttcttcatattctgctagacagaagaattctcagtaacttccttgtgttgtgtgtattcaactcacagagttgaaagatcctttacacagagcagacttgaaacactctttttgtggaatttgcaagtggagatttcagccgctttgaggtcaatggtagaaaaggaaatatcttcgtataaaaactagacagaatgattctcagaaactcctttgtgatgtgtgcgttcaactcacagagttcaacctttcttttcatagagcagttgggaaacactctgtttgtaaagtctgcaagtggatattcagacctctttgaggccttcgttggaagcgggatttcttcatattctgctagacagaagaattcccaataacttccttgtgttgtgtgtgttcaactcacagagttgaactttcatttacacagagcagattggaaacactctttttgtggaatttgcaagtggagatttcaagtgctttgaggccaaaggcagaaaaggaaatatcttcttataaaaactagacagaatcattctcagaaactgctgcatgatgtgtgcgatcaactctcagagtttaacttttcttttcattcagcggtttggaaacactctgtttgtaaagtctgcacgtggaaattttgacaacttagagaccttcgttggaaacgggattttttcatgtaaggctagacagaagaattctcagtaacttccttgtgttgtgtttattcaactcacagagttgaatgatcctttacacagagcagacttgaaacactctttttgtggaatttgcaagtggagatttcagccgctttgaggtcaatggtagaataggaaatatcttactatagaaactagacagaatgattctcagaaactcctttgtgatgtgtgcattcaactcacagagtttaacctttcttttcatagagcagttaggaaacactctgtttgtaaagtctgcaagtggatattcagacctctttgaggccttcgttggaaacgggttttcttcatattctgctagacagaagaattctcagtaacttccttgtgttgtgtgtattcaactcacagagttgaacgatcctttacacagagcagagttgtaacactctttttgtggaatttgcaagtggagaattcagccgctttgaagtcaaaggtagaaaaggaaatatcttcctataaaaactagacagaatgattctcagaaactcctttgtgatgtgtgcgttcaactcacagagtttaacctttcttttcatagagcagttaggaaacactctgttggtaaagtctgcaagtggatattcagacctccttgaggccttcgttggaaacgggatttcttcatattatgctagacagaactattctcagtaacttccttgtgttgtgtgtattcaactgacagagttgaaatttcatttagagagagcagatttgaaacactgtttttgtggaatttgcaagtggagatttcaagcgctttggggccaaaggcagaaaaggaaatatcttcgtataaaaactagacagaataattctcagaaactgctgcgtgatgcgtgcgttcaactctcagagtttaacttttcttttcattcagcggtttggaaacactctgtttgtaaagtctgcaagtggatattcagacctctttgaggccttcgttggaaacgggatttcttcctattatgctagacagaagaattcccaataacttccttgtgttgtgtacattcaactcacagagttgaacgttcccttagacagagcagatttgaaacactctttttgtgcaattggcaagcggagatttcaagcgctttaaggtcaatggcagaaaaggaaatatcttcgtttcaaaactagacagaatcattcccacaaactgcgttgtgatgtgttcgttcaactcacagagtttaacctttcttttcatagagcagttaggaaacagtctgtttgtcaattctgtaagtggatattctgacatcttgtggccttcgatggaaacgggatttcttcatattctgctagacagaagaattctcagtaacttccttgtgttgtgtgtattcaactcacagagtggaacgatcctttacacagagcagacttgagacactctttttgtggaatttgcaagtggagatttcagccgctttgaggtcaatagtggaaaaggaaatatcttcatagaaaaactagacagaatgattctcagaaactcctttgtgatgtgtgcgttcaacacacagagttaaacttttcttttcatagagcagttaggaaacactctgtttgtaaagtctgcaagtggatattcagacctctttgaggccttcgttggaaacaagatttcttcatattatgctagacagaagaattctcagtaacttccttgtgttgtgtgtattcaactgacagagttgaactttcatttagagagagcagatttgaaacactgtttttgtggaatttgcaagtggagatttcaagcgctttcgggccaaaggcagaaaaggaaatatcttcgtataaaaactagacagaatcattctcagaaactgctgcgtgatgtgtgcgttcaactctcagtgtttaacttttcttttcattcagcggtttggaaacactctgtttgtaaagtctgcacgtggatattttgaccacttagaggccttcgttggaaacgggtttatttcatgtaaggctagacagaagaattcccagtaacttctttgtgttgtgtgcattcaactcacacagttgaacgttcccttagacagagcagatttgaaacactctatttgtgcaatttgcaagtgtagatttcaagcgctttaaggtcaatggcagaaaaggaaatatcttcgtttcaaaactagacagaatcattcccacaaactgcgttgtgatgtgtttgttcaactcacagagtttaacctttcttttcatagagcagttaggaaacagtctgtttgttaattctgtaagtggatattctgacatcttgtggccttcgttggaaacgggatttcttcatattctgctagacagaagaattctcagaaacttccttgtgttgtgtgttttcaactcacagagttgaacgatcctttacacagagtagacttgaaacactctttttgtgtaatttgcaagtggagatttcagccgctttgaggtcaatggtagaaaaggaaatatcttcgtataaaaactagacagagtgattctcagaaactcctttgtgatgtctgcgttcaactcacagagttgaacctttcttttcatagagcagttaggaaacactctgtttgtaaagtctgcaagtggatattcagacatctttgaggccttcgttggaaacgggatttcttcatataatgctagagagaagaattctcagtaacttaccttgtgttgtgtgtattcaactgacagagttgaactttcatttagagagagcagatttgaaacactgtttttgtggaatttgcaagtggagatttcaagcactttggggccaaaggcagaaaaggaaatatcttcgtataaaaactagacagaatcattctcagaaactgctctgcgatgtgtgcgttcaactctcagagtttaacttttcttttcattcagcagtttggaaacactctgtttgtaaagtctgcacgtgcataatttgaccacttagaggccttcgttggaaacgggtttttttcatgtaaggctagacagaagaattctcagtaacttccttgtgttgtgtgtattcaactcacagagttgaacgatcctttacacagagcagacttgaaacgctcgttttgtggaatttgcaagtggagatttcagccgctttgaggtcaatggtagaaaaggaaatatcttcgtataaaaactagacagaatgattctcagaaactcctttgtgatgtgtgcgttcaactcacagagtttaccctttcttttcatagagcagttaggaaacactctgtttgtaaagtctgcaagtggatattcagacatccttgaggctttcgttggaaacgggatttcttcatattctgctagacagaagaattctcagtaacttccttgtgttgtgtgtattcaactcacagagttgaacgatcctttacacagagcggagttgaaacactctttttgtggaatttgcaagtggagatttcagccgctttgaggtcaatggtagaaaaggaaatatcttcttatacagactatacagaatgattctcagaaactcctttgtgatgtgtgcgttcaactcacagagtttaacctttctgttcatagagcagttaggaaacactctgtttgtaaagtctgcaagtggatattcagacctccttgaggccttcgttggaaacgggatttcttcctattctgctagacagaagaattctcagtaacttccttgtgttgtgtgtattcaactcacagagttgaacgatcctttacacagagcagacttgaaacactctttttgtggaatttgcaagtggagatttcagccgcgttgaggtcaatagtagaaaaggaaatatcttcgtagaaaaactagacagaatgattctcagaaactgctctgcgatgtgtgcgttcaactctcagagtttaacttttcttttcattcagcagtttggaaacactctgtttgtaaagtctgcacgtggatattttgaccacttagaggccttcgttggaaacgggttttttttcctgtaaggctagacagaagaattcccagtaacttgcttgtgttgtgtacattcaactcacagagttgaacgttcccttagacagagcagatttgaaacactctttttgtgcaattggcaagtggagatttcaagcgctttaaggtcaatggcagaaaaggaaatatgttcgtttcaaaactagacagaatcattcccacaaactgcgttgtgatgtgttcgttcacctcacagagtttaacctttctgttcatagagcagttaggaaacactctgtttgtaaagtctgcaagtggatattcagacctctttgaggccttcgttggaaacgggatttcttcatattctgctagacagaagaattctcagtaacttccttgtgttgtgtgtattcaactcacagagttgaacgatcctttacacagagcagacttgaaacactctttttgtggaatttgcaattggagatttcagccgctttgaggtcaatagtagaaaaggaaatatcgtcgtagaaaaactagacagaatgattctcagaaactcctttgtgatgtgtgtgttcaactcacagagtttaacctttcttttcatagagcagttaggaatcactctgtttgtaaagtctgcaagtggatattcagacctgtttgaggccttcgttggaaacgggtttttttcatataaggctagacagaagaattctcagtaacttccttgtgttgtgtgtattcaactgacagaattgaactttcatttagagagagcagatttgaaacactgtttttgtggaatttgcaagtggagatttcaagcgctttggggccaaaggcagaaaaggaaatatcttcgtataaaaagtagacagaatgattctcagaaactcctttgtgatgtgtacgttcaacacacagagtataacttttcttttcatagagcagttaggaaacactctgtttgtaaagtctgcaagtggatattcagacctcctttgaggccttcgttggaaacgggatttcttcatattatgctagacagaagaattcccagtaacttccttgtgttgtgtacattcaactcacagagttgaacgttcccttagacagagcagatttgaaacactctttttgtgcaattggcaagtggagatttcaagcgctttaaggtcaatggcagaaaaggaaatatcttcgtttcaaaactagacagaatgattctcagaaactcctttgtgatgtgtgccgttcaactcagagagtttaacctttcttttcatagagcagttaggaaacacgctgtttataaagtctgcaagtggatattcagacccctttgaggccttcgttggaaacgggatttcttcatattatgctagacagaagaattctcagtaacttccttgtgttgtgtgtattcaactcacagagttgaacgatcctttacacaggagcagacttgaaacactctttttgtggaatttgcaagtggagatttcagccgctttgaggtcaatggtagaataggaaatatcttcctatagaaaatagacagaatgattctcagaaactcctttgtgatgtgtgcgttcaactcacagagtttaacctttcttttcatagagcagttaggaaacactctgtttgtaaagtctgcaagtggatgttcagacctctttgaggccttcgttggaaacgggtttttttcatataaggctagacagaagaattcccactaacatccttgtgttgtgtgtgttcaactcacagagttgaactttcatttacacagagcagatttgaaagactctttttgtggaatttgcaaatggagatttcaagcgctttgaggccaaagacagaaaaggaaatatcttcgtttcaaaactagacagaatcattctcagaaactgctgcgtgatgtgtgcgttcaactctcagagtttaacttttcttttcattcagcggtttggaaacactctgtttgtaaaaactgcacgtggatattttgaccacttagaggccttcgttggaaacgggttttttttcatgtaaggctagacagaagaattcccagtaacttccttgtgttgtgtgcattcaactcacagagttgaacgttcccttagacagagcagatttgaaacactctatttgcgcaatttgcaagtgtagatttcaagcgctttcaggtcaatggcagaaaaggaaatatcttcgtttcaaaactagacagaatgattctcagaaactcctttgtgatgtgtgtgttcaactcacagagtttaacctttcttttcatagagcagttaggaaacactctgtttgtaaagtctgcaagtggatattcagacctcgttgaggccttcgttggaaactggatttcttcatattctgctagacagaagaattctcacaatcttccttgtgttgtgtgtattcaactcacagagttgaacgatggtttacacagagcagatttgaaacactctttttgtggaatttgcaagtggagatttcagccgctttgaggtcaatggtagaaaaggaaatatcttcatataaaaactagacagaatgattctcataaactcctttgtgatgtgtgcgttcaactcacagagtttaacttttcttttcatagagcagttaggaaacactctgtttgtaaagtctgcaagtggatattcagacctctttgaggccttcgttggaaacgggatttcttcatattatgctacacagaagaattttcagtaacttccttgtgttgtgtgtattcaactcacagagttgaactttcatttagagagagcagatttgaaacactgtttttgtggaatttgcaagtggagatttcaagcgctttggggccaaaggcagaaaaggaaatatcttcgtataaaaactagacagaatcattctcagaaactgctgcgtgatgtgtgcgttcaactctcagagtttaacttttcttttcattcagcggtttggaaacactctgtaaagtctgcacgtggatattttgaccacttagaggccttcgttggaaacggtttttttttatgtaaggctagacagaagaattcccagtaacttccttgtgttgtgtgcattcaactcacagagttgaacgttcccttagacagagcagatttgaaacactctatttgtgcaatttgcaagtgtagttttcaagctctttaaggtcaacggcagaaaaggaaatatcttcgtttcaaaactagacagaatcattcccacaaactgcgttgtgatgtgttcgttcaactcacagagtttaacctttctgttcatagagcagttaggaaacactctgtttgtaaagtctgtaagtggatattctgacatcttgtggccttcgtgggaatcgggatttcttcatattctgttagacagaagaattctcagaatcttccttgtgttgtgtgtattcaactcacagagttgaacgatggtttacacgagcagatttgaaacactctttttgtggaatttgcaagtggagatttcagccgctttgaggtcaatggtagaaaaggaaatatcttcgtataaaaactagacagaatgattctcagaaacttcattgtgatgtgtgcgttcaactcacagagtttaacctttcttttcatagagcggttaggaaacactctgtttgtaaactctgcaagtggatattcagacctctttgaggccttcgttggaaacgggatttcttcatactgtgctagacagaagaattctcagtaacttccttgtgttgtgtgtattcaactgacagagttgaactttcatttagagagagcagatttgaaacactgtttttgtggaatttgcaaatggagatttcaagcgctttggggccaaaggcagaaaagaaatatcttcgtataaaaactagacagaatcattctcagaaactgctctacgatgtgtgcgttcaactctcagagtttaacttttcttttcattcagcagtttggaaacactctgtttgtaaagtctgcacgtggataatttgaccacttagaggccttcgttggaaacgggtttttttcatgtaaggctagacagaagaattctcagtaacttccttgtgttgtgtgtattcaactcacacagttgaacgatcctttacacagagcagacttgtaacactctttttgtggaatttgcaagtggagatttcagccgctttgaagtcaaaggtagaaaaggaaatatcttcctattaaaactagacagaatgattctcagaaactcctttgtgatgtgtgcgttcaactcacagagtttaacctttcttttcatagagcagttaggaaacactctgtttgtaaagtctgcaagtggatattcagacatccttgaggccttcgctggaaaagggatttcttcatattatgctggacagaagaattctcagtaacttccttgtgttgtgtttattcaactcacagagttgaatgatcctttacaaagagcagacttgaaacactctttttgtggaatttgcaagtggagatttcagccgctttgaggtcaacggtagaaaagtaaatatcttcgtataaagactagacagaatgattctcagaaacttcattgtgatgtgtgcagttcaactcacagagtttaacctttcttttcatagagcagttaggaaacactctgtttgtgaactctgcaagtggatattcagacgtctttgaggccttcgttggaaatgggatttcttcatactgtgctagacagaagaattctcagtaacttccttgtgttgtgtgtattcaactgacagagttgaactttcatttggagagagcagatttgaaacactgtttttgtggaatttgcaagtggagatttcaagcgctttgcggccaaaggctgaaaaggaaatatcctcgtataaaaacaagacagaatcattctcagaaactgctctgcgatgtgtgcgttcaactctcagagtttaacttttcttttcattcagcagtttggaaacactctgtttgtaaagtctgcacgtggatattttgaccacttagaggccttcgttggagacgggtttttttcctgtaaggctagacagaagaattcccagtaacttccttgtgttgtgtacattcaactcacagagttgaacgttcccttagacagagcagatttgaaacacactttttgtgcaattggcaagtggagatttcaagcgctttaaggtcaatggcagaaaagcaaatatcttcgtttcaaaactagacagaatcattcccacaaactgcgttgtgatgtgttcgttcaactcacagagtttaacctttctgttcatagagcagttaggaaacactctgtttgtaaagtctgcaagtggatattctgacatcttgtggccttcgttggaaacgggatttcttcatattctgctagacagaagaattctcagtaacttccttgtgttgtgtgtattcaactcacagagttgaacgatcctttacacagagcagacttgtaacactctttttgtagaatttggaagtggagatttcagccgctttgaagtcaaaggtagaaaaggaaatatcttcctataaaaactagacagaatgattctcagaaattcctttctgatgtgtgcgttcaactcacagagttcaacctttcttttcatagagcagttgggaaacactctgtttgtaaagtctgcaagtggatattcagacttctttgaggccttcgttggaagcgggatttcttcatgttctgcttgacagaagaattcccagtaacttccttgtgttgtgtgtgttcaactcacagagttgaactttcatttacacagagcagatttgaaacactctttttgtggaatttgcaggtggagatttcaagcgctttgaggccaaaggcagaaaaggaaatatcttcctataaaaactagacagaatgattctcagaaactcctttgtgatgtgggcgttcaactcacagagtttaacctttcttttcatagagcagttaggaaacactctgtttgtaacgtctgcacgtggatatttggacttctttgaggtcttcgttggaaacgggtttttttcatgtaaggctagacagaagaattcccagtaacttccttgtgttgtgtgcattcaactcacagaattgaacgttcccttagacagagcagattttaaacactctatttgtgcaatttgcaagtgtagatttcaagcgctttaaggtcaacggcagaaaagaaaatatcttcgtttcaaaactagacagaatcattcccacaaactgcgttgtgatgtgctcgttcaactcacagagtttaacctttcttttcatagagcagttaggaaacactctgtttgtaaagtctgtaagtggatattctgacatcttgtggccttcgttggaaacgggatttcttcatattatgctagacagaagaattctcagaatcttccttgtgttgtgtgtattcaactcacacagttgaacgattgtttacacagagcagatttgaaacactctttctgtggaatttgcaagtggagatttcagccgctttgaggtccatggtagaaaaggaaatatcttcgtataacaactagacagaatgattctgagaaactcctttgtcatgtgtgcgttcaactcacatagtttaacctttcttttcatagagcagttaggaaacactctgtttgtaaagtctgcaagtggatattcagacctccttgaggcattcgttggaaacgggatttcttcatattatgctagacagaagaattcccagtaacttccttgtgttgtgtgtgttcaactcacagagttgaactttcatgtacacagagcagatttgaaacactcttttcgtggaatttgcaaatggagatttcaagcgctttgaggccaaaggcagaaaaggaaatatcttcgtataaaaactagacagaatcattctcagaaactgctgcgtgatgtgtgcgttcaactctcagagtttaacttttcttttcattcagcggtttggaaacactctgtttgtaaagtctgcacgtggatattttgaccacttagaggccttcattggaaacgggtttttttcatgtaaggctagacagaagaattcccagtaacttccttgtgttgtgtgcattcaactcacagagttgaacgttcccttagacagagcagatttgaaacactctatttgtgcaatttgcaagtgtagatttcaagcgctttaaggtcaatggcagaaaaggaaatatcttcgtttcaaaactacacagaacgattgtcagaaactcctttatgatgtgtgcgttcaactcacagagtttaacctttcttttcatagagcagttaggaaacactctgtttgtaaattctgcaagtggataatgagacctctttgaggccttcgttggaaacgggatttcttcatattctgctagacagaagaattctcagtaacttcctcgtgttgtgtgtattcaactcacagagttgaacgatcctttacacagagcagacttgaaacactctttttgtggaatttgcatatggagatttcagccgctttgaggtcaatggttgaaaaggaaatatcttcatataaaaattagacagaatgattctcagaaactcctttgtgatgtgtgcgttcaactcacagagtttaacctttcttttcatagagcagttaggaaacactctgtttgtaaaggctgcacgtggatatttggacttctttgaggccttcattggaaacgggtttttttcatgtaaggctagacagaagaattctcagtaacttccttgtgttgtgtgtattcaactgacagagttgaactttcatttatagagagcagatttgaaacactgtttttgtggaatttgcaagtggagatttcaagcgctgtggggccaaaggcagaaaaggaaatatcttcgtataaaaacaagacagaatcattctcagaaactgctctgtgatgtgtgcgttcaactctcagagtttaacttttcttttcattcagcagtttggaaacactctgtttgtaaagtctgcacgtggatattttgaacacttcgaggccttcgttggaaacgggtttttttcatgtaaggctagacagaagaattcccagtaacttccttgtgttgtgtgcattcaactcacagagttgaacgttcccttagacagagcagatttgaaacactctatttgtccaatttgcaagtgtagatttcaagcgctttaaggtcaacggcagaaaaggaaatatcttcgtttcaaaactagacagaatgattctcagaaactcctttgtgatgtgtgcattcaactcacagagtttaacctttcttttcatagagcagttaggaaacactctgtttgtaaagtctgcaagtggatattcagacctccttgaggcctacgttggaaacgggatttcttcatattatgctagacagaagaattctcagtaacttccttgtgttgtgtgtattcaactcacagagttgaacgatcctttacacagagcagacttgaaacactctttttgtggaatttgcaagtggagatttcagccgatttgaggtcaatggtagaataggaaatatcttcctttagaaactagacagaatgattctcagaatcttctttgtgatgtgtgcgttcaactcacagagtttaacctttcttttcatagagcaggtaggaaacactctgtttgtaaactctgcaagtggatattcagacctcattgaggccttcgttggaaacgggatttcttcatactatgctagacagaagaattcccagtaacttccttgtgttgtgtgtgttcaactcacagagttgagctttcatttacacagagcagatttgaaacactctttttgtggaatttgcaagtggagatttcaagcgctttgaggccaaaggcagaaaaggaaatatcttcgtataaaaactagacagaatcattctcagaaactgctgcgtgatgtgtgcgttcaactctcagagtttaacttttgttttcattcagcggtttggaaacactctgtttgtaaagtctgcacgtggatattttgaccacttagaggccttcgttggaaacgggttttttttcatgtaaggctacacagaagaattcccattaacttccttgtgttgtgtgcattcaactcacagagttgaacgttcccttagacagagcagatttgaaacactctatttgtgcaatttgcaagtgtagatttcaagcgctttaaggtcaacggcagaaaaggaaatatcttcgtttcaaaactagacagaatgattatcataaactcctttgtgatgtgtgccttcaactcacagagtttaacctttcttttcatagagcagttaggaaacactctgtttgtaaagtctgcaagtggatattcagacctccttgaggccttcgttggaaacgggatttcttcatattctgctagacagaagaattctcagtaacttccttgtgttgtgtgtattcaactcacagagttgaacgatcctttacacagagcagacttgaaacactctttttgtggaatttgcaagtggagatttcagccgctttgaggtcaatggtagaaaaggaaactatcttcgtataaagactagacagaacgattctcagaaactcctttgtgatgtgtgcgttcaactcacagagtttaacctttcttttcatagagcagttaggaaacactctgtttgtaaagtctgcaagtggatattcagacctccttgaggccttcgttggaaacgggatttcttcatattctgctagacagaagaattctcagtaacttccttgtgttgtgtgtatgcaactcacagagttgaacgatcctttacacagagcagacttgaaacactctttttgtggaatttgcaagtggagatttcagccgctttgaggtcaatagtagaaaaggaaatatcttcgtagaaaaactacacagaatcattctcagaaactgctgtgtgatgtgtgcgttcaactctcagagtttaacttttcttttcattcagcggtttggaaacactctgtttgtaaagtctgcacgtggatattttgaccacttagaggccttcgttggaaacgggtttttttcatgtaaggctagacagaagaattctcagtaacttccttgtgttgtgtgtattcaactcacagagttgaacgatcctttacacagagcagacttgaaacactctttttgtggaatttgcaagtggagatttcagccgctttgaggtcaatggtagaaaagaaaatatcttcgtagaaaaactagacagaatgattctcagaaactcctttgtgatgtgtgtgttcaactcacagagtttaacctttcttttcatacagcagttagtaaacactctgtttataaagtctgcatgtggatattcagaaccctttgaggccttcgttggaaacgggatttcttcatattatgctagacagaagaattctcagtaacttccttgtgttgtgtgtattcaactcacagaagttgaacgatcctttacacagagcagacttgaaacattctttttgtggaatttgcaagtggagatttcagccgcttagaggtcaatggtagaataggaaatatcttcctatagaaactagacagaatgattctcagaaactcctttgtgatgtgtgcgttcaactcacagagtttaacctttctgttcatagagcagttaggaaacactctgtttgtaaagtctgcaagtggatattcagacctccttgaggccttctttggaaacgggatttcttcatattctgctagacagaagaattcccagtaacttccttgtgttgtgtgtgttcaactcacagagttgaactttcatttacacagagcagatttgaaacactctttttgtggaatttgaaagtggagatttcaagcgctttgaggccaaaggcagaaaaggaaatatcttcgtataaaaactagacagaatgattctcagaaactgctctgcgatgtgtgcgttcaactctcagagtttaacttttcttttcattcagcagtttggaaacactctgtttgtaaagtctgcacgtggatattttgaccacttagaggccttcgttggaaacgggtttttttcctttaaggctagacagaagaattcccagtaacttccttgtgttgtgtacattcaactcacagagttgaacgttccctcagacagagcagatttgaaacactctttttgtgcaattggcaagtggtgatttcagccgctttgaggtcaatggtagaaaaggaaatatcttcgtataaaaactagacagaatgattctaagaaaatattttgtgatgtgtgcgttcaactcacagagtttaacttttcttctcatagagcagttaggaaacactctgtttgtaaagtgtgcaagtggatattcagacctctttgaggccttcgttggaaaagggatttcttcatattatgctagacagaataattctcagtaacttgccttgtgttgtgtgtattcaactcacagagttgaaagaccctttacagagagcaggcttgaaacactctttttgtcgaatttgcaagtggagatttcagccgctttgaggtcaatggtagaataggaaatatcttcttatagaaactagacagaatcattctcagaaactcctttgtgatgtgtgtgttcaactcacagagtttaacctttcttttcatagagcagttagtaaacactctgtttataaagtctgcaagtggatattcagacccctttgaggccttcgttggaaacggggatttcttcatattatgctagacagaagaattctcagtaacttccttgtgttgtgtgtattcaactgacagagttgaactttcatttagagagagcagatttgaaacactgtttttgtggaatttgcaagaggagatttcaagcgctttggggccaaaggcagaaaaggaaatatcttcgtataaaaactagacagaatcattctcagaaactgctgcgtgatgtgtgcgttcaactctcagagtttaacttttcttttcattcagcggtttggaaacactctgtttgtaaagactgcacgtggatattttgaccacttagaggccttcgttggaaaggggttttttttcatgtaaggctagacagaagaattcccagtaacttccttgtgttgtgtgcattcaactcacagagttgaacgttcccttagacagagcagatttgaaacactctatttgtgcaatttgcaagtgtagatttcaagcgctttaaggtcaatggcagaaaaggaaatatcttcgtttgaaaactagacagaatgattctcagaaactcctttgtgatgtgtgcgctcaactcacagagtttaacctttcttttcatagagcagttaggaaacactctgtttgtaaagtctgtaagtggatattctgacatcttgtggccttcgttggaaacgggatttcttcatattctgctagacagaagaattctcagtaacttccttgtgttgtgtgtattgaactcacagagttgaacgatcctttacacagagcagacttgaaacactctttttgtggaatttgcaagtggagatttcagccgctttgaggtcaacagtagaaaaggaaatatcttcgtagaaaaactagacagattgattctcataaactcctttgtgatgtgtgcgttcaactcacagagtttaacctttcttttcatagagcagttaggaaacactctgtttgtaaagtctgcaagtggatattcagacctctttgaggccttcgttggaaacgggatttcttcatattctgctagacagaagaattcccagtaacttccttgtgttgtgtgtgttcaactcacagagttgaactttcatttacacagagcagatttgaaacactctttttgtggaatttgcaaatggagatttcaagcactttgaggccaaaggcagaaaaggaaatgtcttcgtttcaaaactagacagaatcattctcagaaactgctgcgtgatgtgtgcgttcaactctcagagtttaacttttcttttcattcagcggtttggaaacactctgtttgtaaagtctgcacgtggatattttgaccacttagaggtcttcgttggaaacgggttttttttaatgtaaggctagacagaagaattcccagtaacttccttgtgttgtgtgtattcaactcacagagttgaacgttcccttagacagagcagatttgaaacactctatttgtgcaatttgcaagtgtagatttcaagcgctttaaggtcaatggcagaaaaggaaatatcttcgtttgaaaactagacagaatcattcccacaaactgcgttgtgatgtgttcgttcaactcacagagtttaacctttcttttcatagagcagttaggaaacagtctgtttgtcaattctgtaagtggatattctgacatcttgtggccttagttggaaacgggatttcttcatattctgctagacagaagtattctctttaacttccttgtgttgtgtgtattcaactcacagagttgaacgatcctttacacagagcagacttgaaacactctttttgtggaatttgcaagtggagatttcagccgctttgaggtcaatgttagaataggaaatatcttcctatagaaactagacagaatgattctcagaaactcctttgtgatgtgtgcgttcaactcacagagtttaacctttcttttcatagagcagttaggaaacactctgtttgtaaagtctgcaagtggatattcagacctctttgaggccttcgctggaaacgggtttttttcatataaggctagacagaagaattcccagtaacttccttgtgttgtgtgtgttcaactcacagagttgaactttcatttacacagagcagatttgaaacactctttttgtggaatttgcaggtggagatttcaagcgctttgaggccaaaggcagaaaaggaaatatcttcgtttcaaaactagacagaatcattctcagaaactgctgcgtgatgtgtgcgttcaactgtcagagtttaacttttcttttcattcagcggtttggaaacactctgcaaagtctgcacgtggatattttgaccacttagaggccttcgttggaaacgggttttttttatgtaaggctagaccgaagaattccccgtaacttccttgtgttgtgtgcattcaactcacagagttgaacgttcccttagacagagcagatttgaaacactctatttgtgcaatttgcaagtgtagttttcaagctctttaaggtcaacggcagaaaaggaaatatcttcgtttcaaaactagacagaatcattcccacaaactgcgttgtgatgtgttcgttcaactcacagagtttaacctttcttttcatagagcagttaggaaacagtctgtttgtcaattctgtaagtggatattctgacatcttgtggccttagttggaaacgggatttcttcatattctgctagacagaagaattcccagtaatttccttgtgttgtgtggattcaactcacagagttgaacgatactttaaacagagcagattagaaacactctttttgtggaatttgcaagtggagatttcagccgctttgaggtcaatggtagaaaagggaatatcttcgtataaaaactagacagaatgattctcagaaactcctttgtaatgtgtgtgttcaactcacagagtttaacctttctgttcatagagcagttaggaaacactctgtttgtaaagtctgcaagtggatattcagacctctttgaggccttcgttggaaacgggatttcttcatattctgctagacagaagaattctcagaaacttccttgtgttgtgtgttttcaactcacagagttgaacgatgctttacacagagtagacttgaaacactctttttgtgtaatttgcaagtggagatttcagccgctttgaggtcaatggtagaaaaggaaatatcttcgtataaaaactagacagaatgattctcagaaactcctttgtgatgtgtgcgttcaactcacagagtttatcctttcttttcatagagcagttaggaaacactctgtttgtaaagtctgcaagagaatattcagacatctttgagactttcgttggaaacgggatttcatcatattctgctagacagaagaattctcagtaacttccttgtgttgtgtgtattcaactgacagagttgaactttcatttagagagagcagatttgaaacactgtttttgtggaatttgcaagtggagatttcaaacgctttggggccaaaggcagaaaaggaaatatcttcgtataaaaactagacagactcattctcagaaactgctctgcgatgtgtgcgttcaactctcagagtttaacttttcttttcattcagcagtttggaaacactctgtttgtaaaatctgcacgtggatattttgaccacttagaggccttcgttggaaacgggtttctttcctgtaaggctagacagaagaattcccagtaacttccttgtgttgtgtacattcaactcacagagttgaacgttcccttagacagagcagatttgaaacactctttttgtgcaattggcaagtggagatttcaagcgctttaaggtcaatggcagaaaaggaaatatcttcgtttcaaaactagacagaatcattcccaaaaactgcgttgtgatgtgttcgttcatctcacagagtttaacctttcttttcatagagcagttaggaaacagtctgtttgtaaattctgtaagtggatattctgacatcttgtggccttcgttggaaacgggatttcttcatattctgctagacagaagaattctcagtaactgccttgtgttgtgtgtattcaactcacagagttgaacgatcctttacacagaacagacttgaaacactctttttgtggaatttgcaagtggagatttcagccgctttgaggtcaatggtagaataggaaatatcttcctgtagaaactagacagaatgattctcagaaactcctttgtgatgtgtgcgttgaactcacagagtttaacctttcttttcatagagcagttaggaaacactctgtttgtaaagtctgcaagtggatattcagacctccttgagaccttcgttggaaacgggatttcttcatattatgctagacagaagaattctcagtaacttccttgtgttgtgtgtattcaactgacagagttgaactttcatttagagagagcagatttgaaacactctttttgtggaatttgcaagtggagatttcaagcgctttgtggccaaaggcagaaaacgaaatatcttcgtataaaaactagacagaatcattctcagaaactgctgagtgatgtgtgcgttcaactctcagagtttaacttttcttttcattcagcggtttggaaacactctgtttgtaaagtctgcacgtggacattttgaccacttagaggccttcgttggaaacgggtttttttcatgtaaggctagacagaagaattcccagtaacttccttgtgttgtgtgcattcaactcacagagttggacgttcccttagaaagagcagatttgaaacactctatttgtgcaatttgcaagtgtagatttcaagctctttaaggtcaatggcagaaaaggaaatatcttcgtttcaaaactagacagaatcattcccacaaactgcgttgtgaggtgttcgttcaactaacagagtttaacctttctgttcataaagcagttaggaaatactctgtttgtaaagtctgaaagtggatattctgacatcttgtggccttcgttggaaacgggatttcttcatattctgctagacagaagaattctcagaaacttccttgtgttgtgtgtattcaactcacacagttgaacgatggtttacacagagcagatttgaaacactctttttgtggaatttgcaagtggagatttcagccgctttgaggtcaatggtagaaaaggaaatatcttcgtataaaaactagacagaatgattctcagaaactcctttgtgatgtgtgcgttcaactcacagagtttaacctttctgttcatagagccgttaggaaacactctgtttgtaaagtctgcaagtggatattcagacctctttgaggccttcgttggaaacgggatttcttcatattctgctagacagaagaattcccagtaacttccttgtgttgtgtgtgttcaactcacagagttgaactttcatttacacagagcagatttgaaacactctttttgtggaatttgcaagtggagatttcaagcgctttgaggccaaagcagaaaaggaaatatcttcgtataaaaactagacagaatcattcttagaaactgctctgcgatgtgtgcgttcaactctcagagtttaacttttcttttcattcagcagtttggaaacactctgtttgtaaagtctgcacgtggataacttgaccacttagaggccttcgttggaaacgggtttttttcatgtaaggctagacagaattcccagtaacttccttgtgttgtgtacattcaactcacagagttgaacgttcccttagacagagcagatttgaaacactctttttgtgcaattggcaagtggagatttcaagcgctttaaggtcaatggcagaaaaggaaatatcttcgtttcaaaactagacagaatcattcccacaaactgcgttgtgatgtgttcgttcatctcacagagtttaacctttcttttcatagagcagttaggaaacagtctgtttgtaaattctgtaagtggatattctgacatcttgtggccttcgttggaaacgggatttcttcatattctgctagacggaagaattctcagtaacttccttgtgttgtgtgtattcaactcacagagttgaacgatcctttacacagagcagacttgaaacactctttttgtggaatttgcaagtgcagatttcagccgctttgaggtcaatggtagaaaaggaaactatcttcatataaagactagacagaatgattctcagaaactcctttgtgatgtgtgtgttcaactcacagagtttaacctttcttttcatagagcagttagtaaacactctgtttataaagtctgcaagtggatattcagacccctttgtggccttcgttggaaacgggatttcttcatattatgctagacagaagaattcccagtaacttccttgtgttgtgtgtgttcaactcacagagttgaactttcatttacacagagcaggtttgagacactctttttgtggaatttgctaatggagatttcaagcgctttgaggccaaaggcagaaaaggaaatatcttcgtataaaaactagacagaatcattctcagaaactgctctgcgatgtgtgcgttcaactctcagagtttaacttttcttttcattcagcagtttggaaacactctgtttgtaaagtctgcacgtagataatttgaccacttagaggccttcattggaaacgggtttttttcctgtaaggctagacagaagaattcccagtaacttccttgtgttgtgtacattcaactcacagagttgaacgttcccttagacagagcagatttgaaacactctttttgtgcaattggcaagtggagatttcaagcgctttgaggtcaatggcagaaaaggaaatatcttcgtttcaaaactagacagaatcattcccacaaactgcgttgtgatgtgttcgttcaactcacagagtttaacctttctgttcacagagcagttaggaaacactctgtttctaaagtctgtaagtggatattctgacatcttgtggccttcgttggaaacgggatttcttcatattctgctagacagaagaattctcactaacttccttgtgttgtgtgtattcaactcacagagttgaacgatcctttacagagagcagacttgaaacactctttttgtggaatttgcaagtggagatttcagccgctttgaggtcaatggtagaaaaggaaatatcttcgtataaagactagacagaatgattctcagaaactcctttgtgatgtgtacgttcaactcacagagtttaacctttcttttcttagagcagttaggaaacactctgtttgtaaagtctgcaagtggatattcagacctccttgaggccttcgttggaaacgggtttttttcatataaggctagacagaagaattcccagtaacttccttgtgttgtgtgtgttcaactcacagagttgaactttcatttacacagagcagatttgaaacactctttttgtggaatttgaaagtggagatttcaagcgctttgaggccaaaggcagaaaaggaaatatcttcgtttcaaaactagacagaatcattctcagaaactgctgcgtgatgtgtgcgttcaactctcagagtttaacttttcttttcattcagcggtttggaaacactctgtttgtaaagtctgcacgtggatattttgaccacttagaggccttcattggaaacgggtttatttcatgtaaggctagacagaagaattctcagtaacttccttttgttgtgtacattcaactcacagagttgaacgttcccttacacagagcagatttgaaacactctttttgtgcaattggcaagtggagatttcaagcgctttgaggccaaaggcagaaaaggaaatatcttcgtataaaaactagacagaatcattcccacaaactgcgttgtaatgtgtgcgttcaactcacagagtttaacctttcttttcatagaacagttaggaaacactctgtttgtaaagtctgcaagtggatattcagacctctttgaggccttcgttggaaacgggatttcttcatattctgctagacagaagaattctcagtaacttccttgtgttgtgtgtattcaactcccagagttgaacgttcccttagacagagcagatttgaaacactctttttgtgcaattggcaagtggtgatttcagccgctttggggtcaatggtagaaaaggtaatatcttcgtataaaaactagacagaatgattctcagaaacttcattgtgacgtgtgcgttcaactcagagagtttaacctttcttttcatagagcagttaagaaacactctgtttgtaaagtctgcaagtggatattcagacctctttgaggccttcgttggaaacgggatttcttcatactgtgctagacagaagaattccgagtaacttccttgtgttgtgtgtgttcaactcacagagttgaactttcatttacacagagcagatttgaaacactctttttgtggaatttgcaagtggagatttcaagcgctttgaggccaaaggcagaaaaggaaatatcttcgtttcaaaactagacagaatcattctcagaaactgctctgttatgtgtgcgttcaactctcagagtttaacttttcttttcattcagcagtttggaaacactcagtttgtaaagtctgcacgtggatattttgaccacttagaggtcttcgttggaaacgggtttttttcatgaaaggctagacagaagaattcccagtaacttccttgtgttgtgtacattcaactcacagagttgaacgttcccttagacagagcagatttgaaacactctttttgtgcaattggcaaatggagatttcaagtgctttaaggtcaatggcagaaaaggaaatatcttcgtttcaaaactagacagattgattctcagaaactcctttgtgatgtgtgcgttcaactcacagagtttaacctttcttttcatagagcagttaggaaacactctgtttgtaaagtctgcaagtggatattcagacctctttgaggccttcgttggaaacgggatttcttcctattatgctagacagaagaattctcagtaacttccttgtgttgtgtgtattcaaatcacagagttgaacgatcctttacacagagcagacttcaaacactctttttgtggaatttgcaagtggagatttcagccgctttgaggtcaatagtagaaaaggaaatatcttcgtagaaaaactagacagaatgattctcagaaactcctttgtgatgtgtgcgttcaactcacagagtttaacctttctgttcatagagctgttaggaaacactctgtttgtaaagtctgcaagtggatattcagacctccttcaggccttcgttggaaacgggatttcttcatattctgctagacagaagaattctcagtaacttccttgtgttgtgtgtgttcaactcacagagttgaactttcatttacacagagcagatttgaaacactctttttgtggaatttgcaagtggagatttcaagcgctttgaggccaaaggcagaaaaggaaatatcttcgtttcaaaactagacagaatcattctcagaaactgctctgcgatgtgtgcgtttaactctcagagtttaacttttcttttcattcagcagtttggaaacactctgtttgtaaagtctgcacgtggataatttgactacttagaggccttcgttggaaacgggtttttttcatgtaaggctagacagaagaattcccagtaacttccttgtgttgtgtacattcaactcacagagttgaacgttcccttaaacagagcagatttgaaacactctttttgtgcaattggcaagtggagatttcaagcgctttgaagtcaatggcagaaaaggaaatatcttcgtttcaaaactagatagaatcattcccacaaactgcgttgtgatgtgttcgttcaactcacagagtttaacctttcttttcatagagcagttaggaaacagtctgtttgtaaattctgtaagtggatattctgacagcttgtggccttcgttggaaacgggatttcttcatactatgctagacagaagaattctcagtaacttccttgtgttgtgtgtattcaactcacagtgttgaacgatcctttacacagagcatacttgaaacactcttgttgtggaatttgcaagtggagaattcagccgctttgaggtcaatggtagaataggaaatatcttcctatagaaactagacagaatgattctcagaaacttcattgtgatgtgtgcgttcaactcacagtttaacctttcttttcatagagcagttaggaaacactctgtttgtaaactctgcaagtggatattcagacctctttgaggccttcgttggaaacgggtttttttcatataaggctagacagaagaattcccagtaacttccttgtgttgtgtgtgttcaactcacagagttgtactttcatttacacagagcagatttgaaacactctttttgtggaatttgcaaatggagatttcaagcgctttgaggccaaaggcagaaaaggaaatatcttcgtataaaaactagacagaatcattctcagaaactgctctgcgatgtgtgcgttcaactctcagagtttaacttttcttttcattcagcagtttggaaacacactgtttgtaaagtctgcacgtggatactttgaccacttagaggccttcgttggaaacgggtttttttcctgtaaggctagacagaataattcccagtaacttccttgtgttgtgtacattcaactcacagagttgaacgttcccttggacagagcagatttgaaacactctttttgtgcaattggcaagtggagatttcaagcgcttaaggtcaatggcagaaaaggaaatatcttcgtttcaaaactagacagaatcattcccacaaactgcgttgtgatgtgttcgttcaactcacagagtttaaccattcttttcatagagcagttaggaaacactctgtttgtaaattctgtaagtggatattctgacatcttttggccttcgttggaaacgggatttcttcatattctgctagacagaagaattctcagtaacttccttgtgttgtgtgtattcaactcacagagttgaacgatcctttacacagagcggacttgaaacactcgttttgtggaatttgcaagtggagatttcagccgtgttgaggtaaatagtagaaaaggaaatatcttcgtataaaaactagacagaatgattctcataaactcctttgtgatgtgtgcgttcaactcacagagtttaacctttcttttcatagagcagttaggaaacactctgtttgtaaagtctgcaagtggatattcagacctctttgaggccttcgttggaaacgggatttcttcctattctgctagacagaagaatttccagtaacttccttttgttgtgtgtgttcaactcacagagttgaactttcatttacacagagcagatttgaaacactctttttgtggaatttgcaagtggagatttcaagcgctttgaggccaaaggcagaaaaggaaatatcttcgtataaaaactagacagaatcattctcagaaactgctgcgtgatgtgtgcgttcaactatcagagtttaacttttcttttcattcagcggtttggaaacactctgtttgtaaagtctgcacgtggatattttgaccacttagaggccttcgttggaaacgggttttttgcatgtaaggctaaacagaagaattcccagtaacttccttgtgttgtgtacattcaactcacagagttgaacgttcccttagacagagcagatttgaaacactctttttgtgcaattggcaagtggttatttcagccgctttgaggtcaatggtagaaaaggaaatatcttcgtataaaaactagacagaatgattctcagaaacttcattgtgatgtgtgcgttcaactcacagagtttaacctttctttttatagagcagttaggaaacactctgtttgtaaactctgcaagtggatattcagacctctttgaggccttcgttggaaacgggttttcttcatactgtgctagacagaagaattctcagtaacttccttgtgttgtgtgtattcaactcacagagctgaacgatcctttacacagggcggacttgaaacactctttttgtggaatttgcaagtggagatttcagccgctttgaggtcaatgttagaaaaggaaatatcttcgtataaaaactagacagaatgattctcagaaactcctttgtgatgtgtgcgttcaactcatagagtttaacttttcttttcatagagcagttaggaaacactctgtttgtaaagtcttcaagtggatattcagacctctttgaggccttcgttggaaacgggatttcttcatattctgctagacagaagaattctcagtaacttccttgtgttgtgtgtattcaactcacagagttgaactttcatttagagagagcagatttgaaacactgtttttgtggaatttgcaagtggagatttcaagcgctttggggccaaaggcagaaaaggaaatatcttcgtataaaaactagacagaatcattctcagaaactgctgcatgatgtgtgcgttcaactctcagagtttaacttttcttttcattcagcggtttggaaacactctgtttgtaaagtctgcacgtggatattttgaccacttagaggccttcgttagaaacgggtttttttcatgtaaggctagacagaagaattcccagtaacttccttgtgttgtgtgcattcaactcacagagttgaacgttcccttagacagagcagatttgaaacactctatttgtgcaatttacaagtgtagatttcaagcgctttaaggtcaacggcagaaaaggaaatatcttcgtttcaaacctagacagaatcattcccacaaactgcgttgtgatgtgttcgttcaactcacagagtttaacctttctgttcatagagcagttaggaaacactctgtttgtaaagtctgcaagtggatattcagacctcctagaggccttcgttggaaacgggatttctccatattctgctagacagaagaattgtcagaaacttcgttgtgttgtgtgttttcaactcacagagttgaacgatcctttacacagaatagacttgaaacactctttttgtggaatttgcaagtggagatttcagccgctttgaggtcaatggtagaaaaggaaatatcttcgtataaaaactagacagaatgattctgagaaactcctttgtgatgtgtgcgttcaacacacagagtttaacctttcttttcatagagcagttaggaaacactctgtttgtaaagtctgcaagtggatattcagacctccttgaggccttcgttggaaacgcgatttcttcatattatgctagacagaagaattctcagtaacttccttgtgttgtgtgtattcaactgacagagttgaactttcatttggagagagcagatttgaaacactgtttttgtggaatttgcaagtggagatttcaagcgctttggggccaaaggcagaaaaggaaatatcttcgtagaaaaactagacagaatcattctcagaaactgctgcgtgatgtgtgcgttgaactctcagagtttaacttttcttttcattcagcggtttggaaacactctgtttgtaaagtctgcacgtggatattttgaccacttagaggccttcgttggaaacgggtttttttcatgtaaggctagacagaagaattcccagtaacttcccttgtgttgggtgcattaaactcacagagttgaacgttcccttagacagagcagatttgaaacactctatttgtgcaatttgcaagtgtagatttcaagcgctttaaggtcaatggcagaaaaggaaatatcttcgtttcaaaactagacagaatcattcccacaaactgcgttgcgatgtgttcgttcaactcacacagtttaacatttcttttcatagagcacttaggaaacagactgtttgtaaattctgtaagtggatattctgacatcttgtggccttcgttggaaacaggatttcttcatattctgctagacagaataattctcagtaacttccttgtgttgtgtgtattcaactcacagagttgaatgatcctttacacagagcagacttgaaacactctttttgtggaatttgcaagtggagatttcagccgctttgaggtcaatggtagaaaaggaaactatcttcatataaagactagacagaatgattctgagaaactcctttgtgatgtgtgcattcaactcacaaagtttaacctttcttttcatagagcagttaggaaacactctgtttgtaaagtctgcaagtggatattcagacctccttgaggccttcgttggaaacgggatttcttcatattatgctagacagaagaattgtcagtaacttccttgtgttgtgtgtattcaactcacagagttgaacgatcctttacacagagcagacttgaaacactctttttgtggaatttgcaagtggagatttcagccgctttgagttcaagggtagaataggaaatatcttcctatagaaactagacagaatcattctcagaaactgctctgcgatgtgtgcgttcaactctcagagtttaacttttcttttcattcagcagtttggaaacactctgtttgtaaagtctgcacgtggatattttgaccacttagaggccttcgttggaaacgggtttctttcttgtaaggctagacagaagaattcccagtaactttccttgtgttgtgtgcgttcaactcacagagttgaactttcatttacacagagcagatttgaaacactctttttgtggaatttgcaaatggagatttcaagcgctttgaggccaaaggcagaaaaggaaatgtacttcgtttcaaaactagacagaatcattcccacaaactgcgttgtgatgtgttcgttcaactcacagagtttaacctttcggttcatagagcagttaggaaacactctgtttgtaaagtctgtaagtggatattctgacgtcttgtggccttcgtttgaaaagggatttcttcatattctgctagacagaagaattctcggtaacttccttgtgttgtgtgtattcaactcacagagttgaacgatcctttacacagagcagacttgaaacactctttttgtggaatttgcaagtggagatttcagccgctttgaggtcaatgttagaataggaaatatcttcatatagaaactagacagaatgattctcagaaactcctttgtgatgtgtgcgttcaactcacagagtttaacctttcttttcatagagcagttaggaaacactgtgtttgtaaagtctgcaagtggatattcagacctccttgaggcattcgttggaaacgggatttcttcatattatgctagacagaagaattcccagtaacttccttgtgttgtgtgtgttctactcacagagttgaactttgatttacacagagcagatttgaaacactctttttgtggaatttgcaagtggagatttcaagcgctttgaggccaaaggcagaaaaggaaatatcttcgtataaaaactagacagaatcattctcagaatctgctgcgtgatgtgtgcgttcaactctcagagtttaacttttcttttcattcagcggtttggaaacactctgtttgtacagtctgcacgtggatattttgaccacttagaggccttcgttggaaacgggtttttttcatgtaaggctagacagaagaattcccagtaacttccttgtgttgtgtgcattcaactcacagagttgaacgttcccttagacagagcagatttgaaacactctatttgtgcaatttgcaagtgtagttttcaagctctttaaggtcaacggcagaaaaggaaatatcttggtttcaaaactagacagaatcattcccacaaacagcgttgtgatgtgttcgctcaactcacagagtttaacctttcttttcatagagcagttaggaaacagtctgtttgtcaattctgtaagtggatattctgacatcttgtggccttcgttggaaacgggatttcttcatattctgctagacagaagaattctcagtaacttccttgtgttgtctgtattcaactcacagagttgaacgatcctttacacagagcagacttgaaacactctttttgtggaatttgcaagtggagatttcagccgctttgaggtcaatagtagaaaaggaaatatcttcgtataaagactagacagaatgattctcagaaactcctttgtgatgtgtgcgttcaactcacagagtttaacctttcttttcatagagcagttgggaaacactctgtttgtaaagtctgcaagtggatattcagacatccttgaggctttcgttggaaacgggatttcttcatattctgctagaaggaagaattctcagtaacttccttgtgttgtgtgtatacaactcacagagttgaacgatcctttacacagagcggacttgaaacacactttttgtggaatttgcaagtggagatttcaagcgctttgaggccaaaggcagaaaaggaaatatcttcgtataaaaactagacagaatcattctcagaaactgctgtgtgatgtgtgccttcaactctcacagtttaacttttcttttcattcagcggtttggaaacactctgtttgtaaagtctgcacgtggatattttgaccacttagaggccttcgttggaaacgggtttttttcatgtaaggctagacagaagaattctcagtaacttccttgtgttgtgtgtattcaactcacacagttgaacgatcctttacacagagcagacttgtaacactctttttgtggaatttgcaagtggagatttcagccgctttgaagtcaaatgtagaaaaggaaatatcttcctataaaaactagacagatgattctgagaaactcctttgtgatgtgtgcgttcaactcacagagttcaacctttcttttcatagagcagttaggaaacactctgtttgtaaagtctgcaagtggatattcagacatctttgaggctttcgttggaaacaggatttcttcatattctgctagacagaagattctcagtaacttccttgtgttgtgtgtattcaactcacagagttgaacgatcctttacacagagcagacttgaaacactctttttgtggaatttgcaagtggagatttcagccgctttgaggtcaatggtagaataggaaatatcttcctatagaaactagacagaatgattctcagaaactcctttgtgatgtgtgtgttcaactcacagagtttaacctttcttttcatagagcagttaggaaacactctgtttgtaaagtctgcaagtggatattcagacctctttgaggccttcgttggaaacgggattttttcgtataaggctagacagaagaattcccagtaacatccttgtgttgtgtgtgttcaactcacagagttgaactttcatttacacagagcagatttgaaacactctttttgtggaatttgcaaatggagatttcaagcgctttgaggccaaaggcagaaaaggaaatatcttcgtataaaaactagacagaatcattctcagaaactgctctgcgatgtgtgcgttcaactctcagagtttaacttttcttttcattcagcagtttggaaacactctgtttgtaaagtctgcacgtggatattttgaccacttagaggccttcgttggaaacgggtttttttcctgtaacgctagacagaagaattcccagtaacttccttgtgttgtgtacattcaactcacagagttgaacgttcccttagacagagcagatttgaaacactctttttgtgcaattggcaagtggagatttcaagcgctttgaggtcaatggcagaaaaggaaatatcttcgtttcaaaactagacagagtgattctcagaaactcctttgtgatgtctgcgttcaactgacagagtttaacctttcttttcatagagcagttaggaaacactctgtttgtaaagtctgcaattggatattgagacctccttgaggccttcgttggaaacgggatttcttcatattctgctatacagaagaattctcagaaacttccttgtgttgtgtgtattcaactcacagagttgaacgatcctttacacagagcagacttgaaacactctttttgtggaattggcaagtggagatttcagccgctttgaggtcaatggcagaaaaggaaatatcttcgtataaaaactagacagaatgattctcagaaacttcattgtgatgtgtgcgttcaactcacagagcttaacctttcttttcatagagcagttaggaaacactctgtttgtaaactctgcaagtggatattcagacctctttgaggccttcgttggaaacgggatttcttcatactgtgctagacagaagaattcccagtaacttccttgtgtagtgtgtgttcgactcacagagttgaactttcctttacacagagcagatttgaaacactctttttgtggaatttgcaagtggagatttcaagcgctttgaggccaaaggcagaaaaggaaatatcttcgtttcaaaactagacagaatcattctcagaaactgctgcgtgatgtgtgcgttcaactctcagagtttaacttttcttttcattcagcggtttggaaacactgtgtttgtaaagtctgcacgtggatattttgaccacttagaggccttcgttggaaacgggtttctttcatgtaaggctagacagaagaattcccagtaacttccttgtgttgtgtgcactcaactcacagagttgaacgttcccttagacagagcagatttgaaacactctatttgtgcaatttgcaagtgtagatttcaagcgctttaaggtcaatggcagaaaaggaaatatcttcgtttcaaaactagacagaatcattcccacaaactgcgttgtgatgtgttcgttcaactcacagagtttaacctttctgttcatagagcagttaggaaacactgtgtttgtaaagtctgtaagtggatattctgacatcttctggccttcgttggaaacgggatttcttcatattctgctagacagaagaattctcagaatcttccttgtgttgtgtgtattcaactcacagagttgaacgatggtttacacagaacagatttgaaacactctttttgtggaatttgcaagtggagatttcagccgctttgaggtccgtggtagaaaaggaaatatcttcgtataaaaactagacagaatgattctcagaaactcctttgtgatgtgtgcgttcaactcacagagtttaacctttcttttcatagagcagttaggaaacactctgttggtaaagtctgcaagtggatattcagacctctttgaggccttcgttggaaacgggtttttttcatataaggctagacagaagaattcccagtaacttccttgtgttgtgtgtgttcaactcacagagttgaactttcatttacacagagcagatttgaaacactctttttgtggaatttgcaagtggagatttcaggcgctttgaggccaaaggcagaaaaggaaatatcttcgtataaaaactagacagaatcattctcagaaactgctgtgtgatgtgtacgttcaactctcagagttcaacttttcttttcattcagcggtttggaaacactctgtttgtaaagtctgcacgtggatattttgaccacttagaggccttcgttggaaacggttttttttcatgtaaggctagacagaagaattcccagtaacttccttgtgttgtgtgtgttcaactcacagagttgaactttcatttacacagagcagatttgaaacactctttttgtggaatttgcaaatggagatttcaagcgctttgaggccaaaggcagaaaaggaaatatcttcgtttcaaaactagacagaatcattctcagaaacttctttgtgatgtgtgcgttcaactcacagagtttaacctttcttttcatagagcagttaggaaacactctgtttgtaaagtctgcaagtggatattcatacctctttgaggccttcgttggaaacgggatttcttcatactatgctagacagaagaattctcagtaacttccttgtgttgtgtgtattcaactcacagtagttgaacgatcctttacacagagcagtcttgaaacactctttttgtggaatttgcaagtggagatttctgccgctttgaggtcaatggtagaataggaaatatcttcctatagaaactagacagaatgattctcagaaaatcttttgtgatgtgtgcgttcaactcacagagtttcacttttcttctcatggagcagttaggaaacactctgtttgtaaagtctgcaagtggatattcagacccctttgaggccttcgttggaaacgggatttcttcatattctgctagacagaagaattctcagtaacttccttgtgttgtgtgtattcaactgacagagttgaactttcgtttagagagagcagatttgaaacactgtttttgtggaatttgcaagtggagatttcaagcgctttggggccaaaggcaaaaaacgaaatatcttcgtataaaaactagacagaatcattctcagaaactgctgcgtgatgtgtgcgttcaactctcagagtttaacttttcttttcattcagcggtttggaaacactctgtttgtaaagtctgcacgtggacattttgaccacttagaggccttcgttggaaacgggtttttttcatgtaaggctagacagaagaattcccagtaacttccttgtgttgtgtacattcaactcacagagttgaacgttcccttagacagagcagatttgaaacactctttttgtgcaattggcaagtggagatttcaagcgctttaaggtcaatggcagaaaaggaaatatcttcgtttcaaaactagacagaatcattcccacaaactgcgttgtgatgtgttcgttcatctcacagagtttaacctttcttttcatagagcagttaggaaacactctgtttgtaaattctgtaagtggatattctgacatcgtgtggccttcgttggaaacgggatttcttcatattctgctagacagaagaattctcagtaacttccttgtgttgtgtgtattcaactcacagagttgaacgatcctttacacagagcagacttgaaacactctttttgtggaatttgcaagtggagaattcagccgctttgaggtcaatggtagaaaaggaaactatcttcgtataaagaatagacagaatgattctcagaaactcctttgtgatgtgtgcgttcaactcacagagtttaacctttcttgttcatagagcagttaggaaacactctgtttgtaaagtctgcaagtggatattcagacatccttgaggctttcgttggaaacgggatttcttcatattctgctagacaagataattctcagtaacttccttgtgttgtgtgtattcaactgacagagttgaacgttcatttagagagagcagatttgaaacactgtttttgtggaatttgcaattggagatttcaagcgctttggggccaaaggcagaaaaggaaatatcttcgtataaaaactagacagaatcattctcagaaactgctgcgtgatgtttgcgttcaactctcagagtttaacttttcttttcattcagcggtttggaaacactctgtttgtaaagtctgcacgtggaaattttgaccacttagaggccttcgttggaaaagggtttttttcatgtaaggctagacagaagaattctcagtaacttccttgtgttgtgtgtattcaagtgtcacagttgaactttcatttaggccaagcagatttgaaacactctttttgtgcaattggcaagtgcagatttcaagcgctttaaggtcaatggcagaaaaggaaatatcttcgtttcaaaactagacagaatcattcccacaaactgcgttgtgaggtgttcgttcaactcacagagtttaacctttcttttcatagagcagttaggaaacagtctgtttgtaaattctgtaagtggatattctgacatcttgtggccttcgttggaaacgggatttcttcatattctgctagacagaataattctcagtaacttccttgtgttgtgtgtattcaactcacagagttgaaggatcctttacagagagcaggcttgaaacactctttttgtggaatttgcaagtggagatttcagccgctttgaggtcaatggtagaataggaaatatcttcctatagaaactagacagaatgattctcagaaactcctttgtgatgtgtgcgttcaactcacagagtttaacctttcttttcatagagcagttaggaaacactctgtttgtaaagtctgcaaatggatattcagacctctttgaggccttcgttggaaacgggatttcttcatattctgctagacagaagaattctcagtaacttccttgtgttgtgtgtattcaactgacagagttgaactttcatttagagagagcagatttgaaacactgtttttgtggaatttgcaagtggagatttcaagcgctttggggccaagggcagaaaaggaaatatcttcgtataaaaactagacagaagcattctcagaaactgctgcgtgatgtgtgcgttcaactctcagagtttaacttttcttttcattcagcggtttggaaacactctgtttgtaaagtctgcacgtggatattttgaccacttagaggccttcgttggaaacgggttttttgcaagtaaggctagacagaagaattctcagtaaattccttgtgttgtgtgtattcaactcacagagttgaacgatcctttacacagagcagacttgaaacactctttttgtggaatttgcaagtggagatttcagccgctttgaggtcaatggcagaaaaggaaatatcttcgtataaagactagacagaattattctcagaaactcctttgtgatatgtgcgttcaactcacagagtttaacctttcttttcatagagcagttaggaaacactctgtttgtaaagtctgcaagtggatattcagacctctttgaggccttcgttggaaacgggatttcttcatattctgctagagagaagaattctcagtaacttccttgtgttgtgtgtattcaactcacagagttcaacgatcctttacacagagcagacttgaagcactctttttgtggaatttgcgagtggagatttcagccgctttgaggtcaatggtagaataggaaatatcttcctatagaaactagacagagtgattctcagaaactcctttgtgatgtttgcgttcaactcacagagtttaacctttcttttcatagagcagttaggaaacactctgtttgtaaagtctgcaagtggatattcagacctccttgtggccttcgttggaaacgggatttcttcatattctgctatacagaagaattctcagtaacttccttgtgttgtgtgtattcaactgacagagttgaactatcatttagagagagcagatttgaaacactgtttttgtggaatttgcaagtggagatttcaagcgctttggggccaaaggcagaaaaggaaatatcttcgtataaaaactagacagaatcattctcagaaactgctgcgtgatgtgtgcgttcaactctcatagtttaacctttcttttcattcagcggtttggaaacactctgtttgtaaagtctgcacgtggatattttgaccacttagaggccttcgttggaaacgggtttttttcatgtaaggctagacagaagaattcccagtaacttccttgtgttgtgtgcattcaactcacagagatgaacattcccttagacacagcagatttgaaacactgtatttgtgtaatttgcaagtgtagattaaaagcgctttaaggtcaatggcagaaaaggaaatatcttcgtttcaaaactagacagaatcattcccacaaactgcgttgtgatgtgttcgttcaactcacagagtttaacctttctgctcatagagcagttaggaaacactctgtttgtaaagtctgtaagtggatattctgacctcttgtggccttcgttggaaacgggatttcttcatattctgctagacagaataattctcagtaacttccttgtgttgcgtgtattcaactcacagagttgaacgatcctttacagagagcagacttgaaacactctttttgtggaatttgcaagtggagatttcagccgctttgaggtcaatgatagaataagaaatatcttcctatagaaactagacagaatgattctcagaaactcctttgtgatgtgtgcgttcaactcacagagttcaaactttcttttcatagagcagttgggaaacactctgtttgtaaagtctgcaagtggatattcagacttctttgaggccttcgttggaagcgggatttcttcatattctgctagacagaagaattctcagtaacttccttgtgttgtgtgtattcaactgacagagctgaactttcatttagagagagcagatttgaaacactgtttttgtggaatttgcaagtggagatttcaagcgctttggggccaaaggcagaaaaggaaatatcttcgtataaaaactagacagaatcattctcagaaactgctctgcgatgtgtgcgttcaactctcagagtttaacttttcttttcattcagcagtttggaaacactgtgtttgtaaagtctgcacgtggatattttgaccacttagaggccttcgttggaaacgggtttttttcctgtaaggctagagagaagaattcccagtaacttccttgtgttgtgtacattcaactcacagagttgaacgttcccttagacagagcagatttgaaacactctttttgtgcaattggcaagtgctgatttcagccgctttgaagtcaatggtagaaaaggaaatatcttcgtataaaaactagacagaatcattcccacaaactgcgttgtgatgtgttcgttcaactcacagcagtttaacctttctgttcatagagcagttaggaaacactctgtttgtaaagtctgtaagtggatattctgacatcttgtggccttcgttggaaacgggatttcttcattttctgctagacagaagaattctcagaaacttccttgtgttgtgtgttctcaactcacagagttgaacgatgctttacacagagtagacttgaaacactctttttgtgtaatttgcaagtggagatttcagccgctttgaggtcaatggtagaaaaggaaatatcttcgtataaaaactagacagaatgattctcagaaactcctttgtgatgtgtgcattcaactcacagagtttaacttttcttttcatagagcagttaggaaacactctgtttgtaaagtctgcaagaggatattcagacctctttgaggccttcgttggaaacgggtttttttcatataaggctagacagaagaattcccagtaacttccttgtgttgtgtgtgttcaactcacagagttgaactttcatttacacagagcagatttgaaacactctttttgtggaatttgcaaatggaggtttgaagcgctttgaggccaaaggcagaaaaggaaatatcttcgtataaaaactagacagaatcattctcagaaactgctctgcgatgtgtgcgttcaactctcagagtttaacttttctttacattcagcagtttgggaacactctgtttgtaaagtctgcacgtggatattttgaccacttagaggccttcgttggaaacgggtttttttcctgtaaggctagacagaagaattctcagtaacttccttgtgttgtgtgtattcaactcacagagttgaacgatcctttacagagagcagacttgaaacactctttttgtggaatttgcaagtggagatttcagccgctttgaggtcaatagtagaaaaggaaatatcttcgtataaagactagacagaatgattctcagaaactcctttgtgatgtgtgcgttcaacacacagattttaacttttcttttcatacagcagttaggaaacactctgtttgtaaagtctgcaagtggatattcagacctctttgaggccttcgttggaaacgggatttcttaatattatgctagacagaataattctcagtaaattccttgtgctgtgtgtattcaactcacagagttgaacgatcctttacagagagcagacttgaaacactctttttgtggaatttgcaagtggagatttcagcctcttggaggtcaatggtagaataggaaatatcttcctatagaaactagacagaatgattctcagaaactcctttgtgatgtgtgcgttcaactcacagagtttaacctttcttttcatagagcagttcaggaaacactctgtttgtaaagtctgcaagtggatattcagacttctttgaggccttcgttggaaacgggatttcttcatattctgctagacagaagaattctcagtaacttccttgtgttgtgtgtattcaactcacggagttgaatgatcctttacacagagcagacttgaaacactctttttgtggaatttgcaagtggagatttcagccgctttgaggtcaatagtagaaaaggaaatatcttcgtagaaaaactagacagaatcattctcagaaactgctctgcgatgtgtgcgttcaactctcagagtttaactttgtttttcattcagcagtttggaaacactctgtttgtaaagtctgcacgtggataatttgaccacttagaggccttcgttggaaacgggtttttttcatgtaaggctagacagaagaattcccagtaacttccttgtgttgtgtgcattcaactcacagagttgaacgttcccttagacagagcagatttgaaacactctatttgtgcaatttgcaagtgtagttttcaagctctttaaggtcaacggcagaaaaggaaatatcttcgtttcaaaactagacagaatcattcccaaaaactgcgttgtgatgtgttggttcaactcacagagtttaacctttctgttcatagagcagttaggaaacactctgtttgtaaagtctgtaagtggatattctgacatcctgtggccttcgttggaaacgggatttcttcatattctgctagacagaagaattctcagtaacttccttgtgttgtgtgtattcaactcacagagttgaacgatcctttacacagagcggacttgaaacactctttttgtggaatttgcaagtggagattttagccgatttgaggtcaatggtagaataggaaatatcttcctatagaaactagacagaatgattctcataaactcctttgtgatgtgtgcgttcaactcacagagtttaacttttcttttcatagagcagttaggaaacactctgtttgtaaagtctgcaagtggatattcagacctctttgaggccttcgttggaaacgggatttcttcatattatggtagacagaataattctcagtaacttccttgtgttgtgtgtattccactcacagagttgaacgatcctttacagagagcagacttgaaacactctttttgtggaatttgcaagtggagatttcagccgctttgaggtcaatggtagaaaaggaaatatcttcgtataaagactagacagaatcattctcagaaactgctctgcaatgtgtgcgttcaactctcagagtttaacttttcttttcattcagcagtttggaaacactctgtttgtaaagtctgcacgtggatattttgaccacttagaagccttggttggaaacgggtttttttcctgtaaggctagacagaagaattcccagtaacttccttgtgttgtgtacattcaactcacagagttgaacgttcccttagacagagcagatttgaaacactctttttgtgcaattggcaaatggagatttcaagcgctttaaggtcaatggcagaaaaggaaatatctccgtttcaaaactagacagaatcattcccacaaactgcgttgtgatgtgttcgttcaactcacagagtttaacctttcttttcatagagcagttaggaaacagtctgtttgtcaattctgtaagtggatattctgacatcttgtggccttcgttggaaacgggatttcttcatattctcctagacagaagaattctcagtaacttccttgtgttgtgtgtattcaactcacagagttgaacgaccctttacacagagcagattacaaacactctttttgtggaatttgcaagtggagatttcagccgctttgaggtcaatggtagaaaaggaaatatcttcgtacaaaaactagacagaatgtttctcagaaacttctttgtgatgtgtgcgttcaactcacagagtttcacctttcttttcatagagcagttaggaaacactctgtttgtaaactctgcaagtggatattcagacctctttgaggccttcgttggtaacgggatttcttcatactgtgctacacagaagaattctcagtaacttccttgtgttgtgtgtattcaactgacagagttgaactttcatttagagagagcagatttgaagcactgtttttgtggaatttgcaagtggagacttcaagcgctttggggccaaaggcagaaaaggaaataccttcgtataaaaactagacagaatcattctcagaaactgctctgcgatgtgtgcgttcaactctcagagtttaacttttcttttcattcagcagtttggaaacactctgtttgtaaagtctgcacgtggataatttgaccacttagaggccttcgttggaaacggttttttttcatgtaaggctagacagaagaattcccagtaacttccttgtgttgtgtgcattcaactcacagagatgaacgttcccttagacagagcagatgtgaaacactcaatttgtgcaatttgcaagtgtagatttcaagcactttaaggtcaatggcataaaaggaaatatcttcgtttcaaaactagacagaatgattctcatgaactcctttgtgatgtgtgcgttgaactcacagagtttaacctttcttttcatagagcagttaggaaacactctgtttgtaaagtctgcaagtggatattcagacctccttgaggccttcgttggaaacgggctttcttcatattctgctagacagaagaattctcagtaacttccttgtgttgtgtttattcaactcacagatttgaatgatcctttacacagagcagacttgaaacactctttttgtgtaatttgcaagtggagatttcagccgatttgaagtcaatggtagaaaagtaaatatcttcgtataaagactagacagaatgattctcagaaacttctttgtgatgtgtgtgttcaactcacagagtttaacctttcttttcatagagcagttaggaaacactgtgtttttaaactctgcaagtggatattcagacctctttgaggccttcgttggaaacgggatttcttcatactgtgctagacagaagaattctcagtaacttccttgtgttgtgtgtattcaactcacagagttgaacgatcctttacacagagcagacttgaaacactctttttgtggaatttgcaagtggagatttcagccgccttgaggtcaatggtagaaaaggaaatatcttcgtataaaaactagacagaatcattctcagaaactgctctgcgatgtgtgcgttcaattctcagagtttaacttttcttttcattcaacagtttggaaacactctgtttgtaaagtctgcacgtggatattttgaccacttagaggccttcgttggaaacgggtttctttcctgtaaggctagacagaataattctcagtaacttccttgtgttgtgtgtattcaactcacagagttgaaggatcctttacagagagcaggcttgaaacactctttttgtcgaatttgcaagtggaggtttcagccgctttgaggtcaatggtagaataggaaatatcttcttatagaaactagacaaaatgattctcatgaactcctttgtgatgtgtgcgttcaactcacagagtttaacctttcttttcatagagcagttaggaaacactctgtttgtaaagtctgcaagtggatatttagacctccttgaggccttcgttggaaacgggatttcttcatattctgctagacagaagaattctcagtaacttccttgtgttgtgtttattcaactcacagagttgaatgatcctttacacagagcagacttcaaacactctttttgtggaatttgcaagtggagatttcagccgctttgaggtcaatggtagaaaagtaaatatcttcgtataaagactagacagaatgattctcagaaactcctttgtgatgtgtgcgttcaactcacagagtttaacctttcttttcatagagcagttgggaaacactctgtttgtaaagtctgcaagtggatattcagacttctttgaggccttcgttggaagcgggatttcttcatattctgctagacagaagaattctcagtaacttccttgcgttgtgtgtattcaactcacagagttgaacgatcctttacacagagcagacttgaaacactctttttgtggaatttgcaagtggagatttcagccgctttgaggtcaatggtagaataggaaatatcttcctatagaaactagacagaatcattctcagaaactgctgcgtgatgtgtgcgttcaactctcagagtttaacttttcttttcattcagcgctttggaaacactctgtttgtaaagtctgcacgtggatattttgaccacttagaggccttcgttggaaacgggtttttttcatgtaaggctagacagaaaaattcccagtaacttccttgtgttgtgtgcattcaactcacagagttgaacgttcccttagacagagcagatttgaaacactctatttgtgcaatttgcaagtgtagatttcaagcgctttaaggtcaacggcagaaaaggaaatatcttcgttttaaaactagacagaatcattcccacaaactgtgttgtgatgtgttcgttcaactcacagagtttaacctttcttttcatagagcagttaggaaacagtctgtttgtcaattctgtaagtggatattctgacatcttgtggccttcgttggaaacgggatttcttcatattctgctagacagaagaattctcagtaacttccttgtgttgtgtgtattcaactcacagagttgaacgatcctttaaacagagcagacttgaaacactctttttctggaatttgcaagtggagatttcagccgctttgaggtcaatgttagaataggaaatatcttcctatagaaactagacagaatgattctcagaaactcctttgtgatgtgtgcgttcaactcacagagttcaaactttcttttcatagagcagttgggaaaaactctgtttgtaaagtctgcaagtggatattcagacttctttgaggccttcgttggaagcggggtttcttcatattctgctagacagaagaattctcagtaacttcccttgtgttgtgtgtattcaactgacagagttgaactttcatttagagagagcagatttgaaacactgtttttgtggaatttgcaagtggagatttcaaacgctttggggccaaaggcagaaaaggaaatatcttcgtataaaaactagacagaatcattctcagaaactgctctgcgatgtgtgcattcaactctcagagtttaacttttcttttcattcagcagtttggaaacactctgtttgtaaagtctgcacgtggataacttgaccacttagaggccttcgttggaaacgggtttttttcatgtaaggctagacagaagaattcccagtaacttccttgtgttgtgtgcattcaactcacagagttgaacgttcccttagacagagcagatttgaaacactctatttgtgcaatttccaagtgtagatttcaagcgctttaaggtcaacggcagaaaaggaaatatcttcgtttcaaaactagacagaatgattctgagaaactcctttgtgatgtgtgcgttcaactcccacagtttaacctttcttttcatagagcagttaggaaacactctgtttgtaaagtctgcaagtggatattcaggacctccttgaggccttcgttggaaacgggatttcttcatattatgctagacagaagaattctcagtaacttccttgtgttgtgtgtattcaactcacagagttgaacgatcctttacacagagcagacttgaaacactctttctgtggaatttgcaagtggagatttcaggcgctttgaggtcaatagtagaaaaggaaatatcttcgtagaaaaactagacagaatgattctcagaaactcctttgtgatgtgtgtgttcaactcacagagtttaacctttcttttcatagagcagttagtaaacagtctgtttataaagtctgcaagtggatattcagacccctttgaggccttcgttggaaacgggatttcttcatattatgctagacagaagaattctcagtaacttccttgtgttgtgtgtattcaactgacggagttgaactatcatttagagagagcagatttgaaacactgtttttgtggaatttgcaagtggagatttcaagcgctttggggccaaaggcagaaaaggaaatatcttcgtataaaaactagacagaatcattctcagaaactgctctgcgatgtgtgcgttcaactctcagagtttaacttttcttttcattcagcagtttggaaacactctgtttgtaaagtctgcatgtggatattttgaccacttagaggccttcgttggaaacgggtttttttcctgtaaggctagacagaagaattcccagtaacttccttgtgttgtgtacattcaactcacagagttgaacgttcccttagacagagcagatttgaaacactctttttgtgcaattggcaaatggagatttcaagcgcttgaaggtcaatggcagaaaaggaaatatcttcgtttcaaaactagacagaatcattcccacaaactgcgttgtgatgtgtgcgttcaactcaaagagtttaacctttcttttcatagagcagttaggaaacactctgtttgtaaagtctgcaagtggatattcagacctccttgaggccttcgttggaaacgggatttcttcatattctgctagacagaataattctcagtaacttcattgtgttgtgtgtattcaactcacagagttgaaggatcctttacagagagcaggcttgaaacactctttttgtcgaatttgcaagtggagatttcagccgctttgaggtcaatggtagaataggaaatatcttcttatagaaactagacagaatgattctcagaaactcctttgtgatgtgtgtgttcaactcacagagtttaacctttcttttcatagagcagttagtaaacactctgtttataaagtctgcaagtggatattcagacccctttgaggccttcgttggaaacgggatttcgtcatattatgctagacagaagaattctcagtaacttccttgtgttgtgtgtattcaactcacagagttgaacgatcctttacacagagcagattagaaacactctttttgtggaatttgcaggtggagatttcagccgctttgaggtcaatagtagaaaagggaatatcttcgtataaaaactagacagaaatcattctcagaaactgctctgcgatgtgtgcgttcaactctcaggagtttaacttttcttttcattcagcagtttggaaacactctgtttgtaaagtctgcacgtggatattttgaccacttagaggccttcgttggaaacgggtttttttcctgtaaggctagacagaagaattcccagtaacttccttgtgttgtgtacattcaactcacagagttgaacgttcccttagacagagcagatttgaaacactctttttgtgcaattggcaaatggagatttcaagcgctttaagttcaatggcagaaaaggaaatatcttcgtttcaaaagtagacagaatgattctcagaaactcctttgtgatgtgtgcgtgcaactcacagagtttaacttttcttttcatagagcagttaggaaacactctgtttgtaaagtctgtaagtggatattctgacatcttgtggccttcgttggaaacgggatttcttcatattctgctagacagaagagttctcagtaacttccttgtgttgtgtgtattcaactcacagagttgaacgatcctttacacagagcagacttgaaacactctttttgtggaatttgcaagtggagatttcagccgctttgaggtcaatagtagaaaaggaaatatcttcgtagaaaaactagacagagtgattctcagaaactcctttgtgatgtctgcgttcaactcacagagtttaacgtttcttttcatagagcagttaggaaacactctgattgtaaagtctgcaagtggatattcagacctccttgaggccttcgttggatacgggatttcttcatattctgctatacagaagaattctcagtaacttccttgtgttgtgtgtattcaactgacatagctgaactttcatttagagagagcagatttgaaacactgtttttgtggaatttgcaagtggagatttcaagcgctttggggccaaaggcagaaaaggaaatatcttcgtataaaaactagacagaatcattctcagaaactgctgcgtgatgtgtgcgttcaactctcagagtttaacttttcttttcattcagcggtttggaaacactctgtttgtaaagtctgcacgtgggtattttgaccacttagaggccttcgttggaaacgggtttttttcatgtaaggatagacagaagaattcccagtaacttccttgtgttgtgtgcattcaactcacagagttgaacgttcccttagacagagcagatttgaaacactctatttgtgcaatttgcaagtgtagatttcaagcgctttaaggtcaacggcagaaaaggaaatatcttcgtttcaaaactagacagaatcattcccacaaactgcgttgtgatctgttcgttcaactcacagagtttaacctttctgttcatagagcagttaggaaacactctgtttgtaaagtctgtaagtggatattctgacatcttgtggccttcgttggaaacgggatttcttcatattctgctagacagaagaattctcagaaacttccttgtgttgtgtgttttcaactcacagagttgaacgatgctttacacagagcagacttgaaacactcattttgtggaatttgcaaggggagatttcagccgctttgaggtcaatggtagaataggaaatatcttcctatagaaactagccagaatgattctcagaaactcctttgtgatgtgtgcgttcaactcacggagtttaacctttcttttcatagagcagttaggaaacactctgtttgtaaagtctgcaagtggatattcagacatccttgaggctttcgttggaaacgggatttcttcatattctgctagaaagaagaattcccagtaacttccttgtgttgtgtgtgttcaactcacagagttgaactttcatttacacagagcagatttgaaacactctttttgtggaatttgcaagtggagatttcaagcgctttgagaccaaaggcagaaaaggaaatatcttcgtttcaaaacaagacagaatcattctcagaaactgctgcgtgatgtgtgcgttcaactctcagagtttaacttttcttttcattcagcggtttggaaacactctgtttgtaaagtctgcacgtggaaattttgaccacttagaggccttcgttggaaacgggattttttcatgtaaggctagacagaagaattcccagtaacttccttgtgttgtgtgcattcaactcacagagttgaacgttccttagacacagcagatttgaaacactctatttgtgcaatttgcaagtgtagatttcaagcgctttaaggtcaatggcagaaaaggaaatatcttcgtttcaaaactagacagaatcattcccacaaactgcgttgtgatgtgttcgttcaactcacagagtttaacctttcttttcatagagcagtgaggaaacagtctgtttgtcaattctgtaagtggatattctgacatcttgtggccttcgttggaaactggatttcttcatattctgctagacagaataattctcagtaacttccttgtgttgtgtgtattcaactcacagagttgaacgatcctttacacagagcagacttgaaacactctttttgtgggatttgcaagtggagatttcagccgctttgaggtcaatggtagaataggaaatatcttcctatagaaactagacagaatgattctcagaaactcctttgtgatgtgtgtgttcaactcacagagtttaacctttcttttcatagagcagttaggaaacactctgtttgtaaagtctgcaagtggatattcagacctcgttgaggccttcgttggaaacgggatttcttcatattctgctagacagaagaattcccagctaacttccatgtgttgtgtgtgttcaactcacagagttgaactttcatttacacagagcagatttgaaacactctttttgtggaatttgcaaatggagatttcaagcgctttgaggccaaaggcagaaaaggaaatatcttcgtataaaaactagacagaaatcattctcagtaaactgctgcgtgatgtgtgcgttcaactctcagagtttaacttttcttttcattcagcggtttggaaacactctgtttgtaaagtctgcacgtggaaattttgaccacttagaggccttcgttggaaacgggtttttttcatgtaaggctagacagaagaattctcagtaacttccttgtgttgtgtgtattcaactcacagagttgaacgatcctttacacagagcagacttgaaacactctttttgtggaatttgcaagtggagatttcagccgctttgaggtcaatggtagaaaaggaaatatcctcgtatagaaacaagacagaatgattctcagaaactcctttgtgatgtttgcgttcaactcacagagtttaacctttcttttcatagagcagttaggaaacacactgtttataaagtctgcaagtggatattcagacctccttgaggccttcgttggaaacgggatttcttcatattctgctagacagaagaattcccagtaacttccttgtgttgtgtgtattcaactcacagagttgaacgatcctttacacagagcagacttgaaacactctttttgttgaatttgcaagtggagatttcagccgctttgaggtcaatggtagaataggaaatatcttcctatagaaactagacagaatgattctcagaaactcgtttgtgatgtgtgtgttcaactcacagagtttaacctttcttttcatagagccgttagtaaacactctgtttataaagtctgcatgtggatattcagacccctttgaggccttcgttggaaacgggatttcttcatattatgctagacagaagatttctaagtaacttccttgtgttgtgtgtattcaactgacagagtttaactttcatttagagagagcagatttgaaacactgttttcgtggaatttgcaattggagatttcaagcgctttggggccaaaggcagaaaaggaaatatcttcgtataaaaactagacagaatcattctcagaaactgctctgcgatgtgtgcgttcaactctcagagtttaacttttcttttcattcagcagtttggaaacactctgtttctaaagtctgcacgtggataatttgaccacttagaggccttcgttggaaacgggtttttttcatgtaaggctagacagaagaattcccagtaacttccttgtgttgtgtgcattcaactcacagagatgaacattcccttagacagagcagatttgaaacactctatttgtgtaatttgcaagtgtagatttcaagcgatttaaggtcaatggccgaaaaggagatatcttcgtttcaaaactagacagaatgattctctgaaactcctttgtgatgtgtgcgttcaactcacagagtttaacctttcttttcatagagcagttaggaaacactctgtttgaaaagtctgcaagtggatattcagacctctttgaggccttcgttggaaacgggatttcttcatattatgctagacagaagaattctcagtaacttccttgtgttgtgtgtattcaactcacagagttgaacgatcctttacacagagcagacttgaaacactctttttgtggaatttgcaatttgagattacagccgctttgaggtcaatagtagaaaaggaaatatcttcgtagaaaaactagacagaatgattctcagaaactcctttatgatgtgtgtgttcaactcacagagtttaacctttcttttcatagagcagttagtaaacactctgtttataaagtctgcaagtggatattcagatccctttgtggccttcgttggaaacgggatttcttcatattatgctagacagaagaattcccagtaacttcccttgtgttgtgtgtgttcaactcacagagttgaactttgatttacacagagcagatttgaaacactctttttgtggaatttgcaagtggagatttcaagcgctttgaggccaaaggcagaaaaggaaatatcttcgtataaaaactagacagaatcattctcagaaactgctgcgtgatgtgtgcgttcaactctcagagtttaacttttcttttcattcagcggtttggaaacactctgtttgtaaagtctgcaagtggatattttgaccacttagaggccttcgttggaaacgggtttttttcacgtaaggctagacagaagaattcccagtaacttccttgtgttgtgtgcattcaactcacagagttgaacgttcccttagacagagcagatttgaaacactctatttgtgcaattggcaagtgtagatttcaagcgctttaaggtcaatggcagaaaaggaaatatcgtcgttacaaaactagacagaatgattctcagaaacttctttgtgatgtgtgcgttcaactcacagagtttaacctttcttttcatagagcagttaggaaacagtctgtttgtcaattctgtaagtggatattctgacatcttgtggccttcgttggaaacgggatttcttcatattctgctagacagaagaattctcagtaacttccttgtgttgtgtgtattcaactcacaggagttgaacgatcctttacacagagcagacttgaaacactctttttgtggaatttgcaagtggagatttcagccgctttgaggtcaatggtagaaaaggaaatatcttcgtataaaaactagacagaatgattctcagaaactcctttgtgatgtgtgtgttcaactcacagagtttaacctttcttttcatagagcagttagtaaacactctgtttataaagtctgcaagtggatattcaaacccctttgaggccttcgttggaaacgggatttcttcatattctgctagacagaaggattcccagtaacttccttgtgttgtgtgtgttcaactcacagagttgaactttcatttacaaagagcagatttgaaacactctttttgtggaatttgcaagtggagatttcaagcgctttgaggccaaaggcagaaaaggaaatatcttcgtataaaaactagacagaatcattctcagaaactgctctgcgatgtgtgcgttcaactctcagattttaacttttctattcattcagcagtttggaaacactctgtttgtaacgtctgcacgtggataatttgaccacttagaggccttcgttggaaacgggtttttttcatgtaaggctagacagaagaattctcagtaacttccttgtgttgtgtgcattcaactcaaagagttgaacgttcccttagacagagcagatttgaaacactctacttgtgcaatttgcaagtgtagatttcaagcgctttaaggtcaatgacagaaaaggaaatatcttcgtttcaaaactagacagaatcattcccagaaactgcgttgtcatgtgttcgttcaactcacagagtttaacctttctgttcatagagcagttaggaaacactctgtaaagtttgtaagtggatattctgacatcttgtggccttcgttggaaacgggatttcttcatattctgctagacagaagaattctcagtaacttccttgtgttgtgtgtattcaactcacagagttgaacgatccttttcacagagcagacttgaaacactctttttgtggaatttgcaagtggagatttcagccgctttgaggtcaatggtagaaaaggaaatatcttcgtataaagactagactgaaagattctcagaaactcctttgtgatgtgtgtgttcaactcacagagtttaacatttcttttcgtagtgcagttagtaaacactctgtttataaagtctgcaagtggatattcagacccctttgaggccttcgttggaaacgggatttcttcatattctgctagacagaagaattctcagtaacttccttgtgttgggtgtattcaactgacagagttgaactttcatttagagagagcagatttgaaacactgtttttgtggaatttgcaagtggagatttcaagcgctttggggccaaaggcagaaaaggaaatatcttcgtataaaaactagacagaatcattctcagaaactgctgcgtgatgtgtgcgttcaactctcagagtttaacttttcttttcattcagcggtttggaaacactctgtttgtaaagtctgcacgttgatattttgaccacttagaggccttcgttggaaacgggtttttttcatataaggctagatagaagaattcccagtaacttccttgtgttgtgtgcattcaactcacagagttgaacgttcccttagacagagcagatttgaaacactctatttgtgcaatttgcaagtgtagatttcaagtgtttaaggtcaatggcagaaaaggaaatatcttcgtttcaaaactagacagaatcattcccacaaactgcgttgtgatgtgttctttcaactcacagagtttaacctttctgttcatagagcagttaggaaacactctgtttgtaaagtctgtaagtggatattctgacatcttgtggccttcgttggaaacgggatttcttcatattctgctagacagaagaattctcagtaacttccttgtgttgtgtgtattcaactcacagagttgaacgaccctttacacagagcagacttgtaacactctttttgtggaatttgcaagtggagatttcagccactttgaagtcaaaggtagaaaaggaaataacttcctataaaaactagacagaatgattctcagaaactcctttgtgatgtgtgcgttcaactcacagagtttaacctttcttttcatagagcagttaggaaacactctgtttgtaaagtctgcaagtggatattcagacctctttgaggccttcgttggaaatgggtttttttcatataaggctagacagaagaattcccagtaacttcccttgtgttgtgtgtgttcaactcacagagttgaactttcatttacacagagcagatttgaaacactctttttgtggaatttgcaaatggagatttcaagcgctttgaggccaaaggcagaaaaggaaatatcttcgtataaaaactagacagaatcgttctcagaaactgctctgcgatgtgtgcgttcaactctcagagtttaacttttcttttcattcagcagtttggaaacactctgtttgtaaagtctgcatgtggataatttgaccacttagaggccttcgttggaaacgggtttttttcatgtaaggctagacagaagaattcccaataacttccttgtgttgtgtgcattcaactcacagagttgaacgttcttttagacagagcagatcggaaacaatctttttgtgcaatttgcaggtggagatttcaagcgctttaaggtcaatggcagaaaaagatatatatcttcatttcaaaactagacagaatcattcccacaaactgcgttctgatgtgttcgttcaactcacagagtttaacctttcttttcatagagcagttaggaaacagtctgtttgtcaattctgtaagtggatattctgacatcttgtggccttcgttggaaacgggatttcttcatattctgctagacagaagaattctcagtaacttccgcgtgttgtgtgtattcaactcacagagttgaacgatcctttacacagagcagagttgaaacactctttttgtggaatttgcaagtggagatttcagccgctttgaggtcaatggtagaaaaggaaatatcttcgtataaaaactagacagagatgattctcagaactcctttgtgatgtgtgcgttcaactcacagagtttaacctttcttttcatagagcagttaggaaacactctgtttgtaaagtctgcaagtggatattcagacctctttgaggccttcgttggaaacgggtttttttcctataaggctagacagagaattctcagtaacttccttgtgttgtgtgtattcaactgacagagttgaactttcatttagagagagctgatttgaaacactgtttttgtggaatttgcaagtggagatatcaagcgctttggggccaaaggcagaaaaggaaatatcttcgtataaaaactagacagaatcattctcagaaactgctgcgtgatgtgtgcgttcaactctcagagtttaacttttcttttcattcagcggtttggaaacactctgtttgtaaagactgcacgtggatattttgaccacttagaggccttcgttggaaacgggttttttttcatgtaaggctagacagaagaattcccagtaacttccttgtgttgtgtgcattcaactcacagagttgaacgttcccttagacagagcagatttgaaacactctatttgtgcaatttgcaagtgtagttttcaagctctttaaggtcaacggcagaaaaggaaatatcttcgtttcaaaactagacagaatcattcccagaaactgcgttgtgatgtgttcgttcaactcacagagtttaacctttcttttcatagagcagttaggaaacagtctgtttgtcaattctgtaagtggatattctgacatcttgtggccttcgttggaaacgggatttcttcatattctgctagacagaagaattctcagtaacttccttgtgttgtgtgtattctactcacagagttgaacgatcctttacacagagcagacttgaaacactctttttgtggaatttgcaagtggagatttcagccgctttgaggtcaatggtagaataggaaatatcttcctatagaaactagacagaacgattctcagaaactcctttgtgatgtgtgcgttcaactcacagagtttaacttttcttttcatagagcagttaggaaacactctgtttgtaaagtctgcaagtggatattcagacctctttgaggccttcgttggaaacgggatttcttcatattctgctagacagaagaattctcagtaacttccttgtgttgtgtgtattcaactgacagagttgaactttcatttagagagagcagatttgaaacactgtttttgtggaatttgcaagtggtgacttcaagcgctttggggccaaacgcagaaaaggaaatatcttcgtataaaaactagacagaatcattctcagaaactgctgcgtgatgtgtgcgttcaactctcagactttaacttttcttttcattcagcggtttggaaacactctgtttgtaaagtctgcacgtggatattttgaccacttagaggccttcgttggaaacgggtttttttcatataaggctagacagaagaattcccaggaacttccttgtgttgtgcacattcaactcacagagttgaacgttcccttagacagagcagatttgaaacactctttttgtgcaattggcaagtggtgatttcagccgctttgaggtcaatggtagaaaaggaaatatcttcgtataaaaactagacagaatcattcccacaaactgcgttgtgatgtgttcgttcaactcacagagtttaacctttcttttcatagagcagttaggaaacactctgtttgtaaattctgtaagtggatattctgacatcttttggccttcgttggaaacgggatttcttcatattctgctagacagaagaattctcagaatcttccttgtgttgtgtgtcttcaactcacagagttgaacgttggtttacacagagcagatttgaaacactctttttgtggaatttgcaagtggagatttcagccgctttgaggtcaatggtagaaaaggaaatgtcttcgtataaaaactagacagaatgattctcagaaactcctttgtgatgtgtgcgttcaactcacagagtttaacctttcttttcatagagcagttaggaaacactgtgtttgtaaagtctgcaagtggatattcagacctctttgaggccttcgttggaaacgggattttttcatataaggctagacagaagaattcccagtaacttccttgtgttgtgtttgttcaactcacagagttgaactttcatttacccagagcagatttgaaacactctttttgtggaatttgcaagtggagatttcaagcgctttgaggccaaaggcagaaaaggaaatatcttcgtttcaaaactagacagaatcattctcagaaactgctctgcgatgtgtgcgttcaactctcagagtttaacttttcttttcattcagcagtttggaaacactctgtaaagtctgcacgtggatattttgaccatttagaggctttcgttggaaacgggtttttttcttgtaaggctagacagaagaattcccagtaacttccttgtgttgtgtgcattcaactcacagagttgaacgttcccttagacagagcagatttgaaacactctatttgtgcaatttgcaagtgtagatttcaagcgctttaaggtcaatggcagaaaaggaaatttcttcgttttaaaactagacagaatgattctcagaaaatcttttgtgatgtgtgcgttcaactcacagagtgtaacttttcttctcatagagcagttaggaaacactctgtttgtaaagtctgcaagtggatattcagacctctttgaggtcttcgttggaaacgggatttcttcatattatgctagacagaagaattctcagtaacttccttgtgttgtgtgtattcaactcaccgagttgaacgatcctttacacagagcagacttgaaagactctttttgtggaatttgcaagtggagatttcagccgctttgaggtcaatggcagaaaaggaaatatcttcctatagaaactagacagaatgattctcagaaacttctttgtgatgtgtgcgttcaactcacagagtttaacctttcttttcatggagcagttaggaaacactctgtttgtaaactctgcaagtggatattcagacctctttgaggccttcgttggaaacgggatttcttcatactgtgctagacagaagaattcccagtaacttccttgtgttgtgtgtgttcaactcacagagttgaactttcatttacagagagcagatttgaaacactctttttgtggaatttgcaagtggagatttcaagcgctttgaggccaaaggcagaaaaggaaatatcttcgtataaaaactagacagaatcattctcagaaactgctgcgtgatgtgtgcgttcaactctcagagtttaacttttcttttcattcagcggtttggaaacactctgtttgtaaagtctgcacgtggaaattttgaccacttagaggccttcgttggaaacgggtttttttcatgtaaggctagacagaagaattcccagtaacttcgttgtgttgtgtacattcaactcacagagttgaacgttcccttagacagagcagatttgaaacactctttttgtgcaattggcaagtggagatttcaagcgctttaaggtcaatggcagaaaaggaaatatcttcgtttcaaaactagacagaatcattcccacaaactgcgttgtgatgtgttcgttcaactcacagagtttaacctttcttttcatagagcagttaggaaacactctgttggtaaattctgtaagtggatattctgacatcttgtggccttcgttggaaacgggatttctacatattctgctagacagaagaattctcagaaacttccttgtgttgtgtgttttcaactcacagatttgaacgatgctttacaaagagtagacttgaaacactctttttgtggaatttgcaagtggagatttcagccgctttgaggtcaatggtagaataggaaatatcttcctatagaaactagacagaatgattctcagaaaatcctttgtgatgcgtgcgttcaactcacagagtttaacttttcttttcatagagcagttaggaaacactctgtaaagtctgcaagtggatattgagacccctttgaggccctcgttggaaacgtgatttcttcatattctgctagacagaagaattcccagtaacttccttgtgttgtgtgtgttcaactcacagagttgaacgttcccttagacagaggagatttgaaacactctttttgtggaatttgcaagtggagatttcaagcgctttgaggccaaaggcagaaaaggaaatatcttcgtataaaaactagacagaatcattctcagaaactgctctgtgatgtgtgcgttcaactctcagagtttaacttttcttttcattcagcagtttggaaacactctgtttgtaaagtctgcacgtggataatttgaccacttagaggccttcgttggaaacgggtttttttcatgtaaggctatacagaagaattcccagtaacttccttgtgttgtgtacattcaactcacagagttgaacgttcccttagacagaacagatttgaaacactctttttgtgcaattggcaagtggtgatttcagccgctttgaggtcaatggtagaaaaggaaatatcttcgtataaaaactagacagaatgattctcagacactcctttgtgatgtgtgcgttcaactcacagagtttaacctttcttttcatagagcagttaggaaacactctgtttgtaaagtctgcaagtggatattcagacctctttgaggccttcgttggaaacgggatttcttcatattatgctagacagaagaattctcagtaacttccttttgttgtgtgtattcaactcacagagttgaacgatcctttacacagagcagacttgaaacactctttttgtggaaattgcaagtggagatttcagccgctttgaggtcaatggtaaaaaaggaaatatcttcgtataaaaactagacagaatgattctcagaaactcctttgtgatttgtgtgttcaacccacagagtttaacatttcttttcatagagcagttaggaaacactctgtttgtaaagtctgcaagtggatattcagacctctttgaggccttcgttggaaacgggtttttttcatataaggctagacagaagaattcccagtaacttccttgtgttgtgtgtgttcaactcacagagttgaactttcatttacacagagcagatttgaaacactctttttgtggaatttgcaagtggagatttcaagcgctttgaggccaaaggcagaaaaggaaatatcttcgtttccaaactagacagaatcattctcagaaactgctctgtgatgtgtgcgttcaactctcagagtttaacttttcttttcattcagcagtttggaaacactctgtttctaaagtctgcacgtggataatttgaccacttagaggccttcgttggaaacgggtttttttcatgtaaggctagacagaagaattcccagtaacttccttgtgttgtgtgcattcaactcacagagttgaacgttcccttagacagagcagatttgaaacagcctatttgtgcaatttgcaagtgtagatttcaagctctttaaggtcaacggcagaaaaggaaatatcttcgtttcaaaactagacagaattattcccacaaactgcgatgtgatgtgttcggtcaactcacagagtttaacctttctgttcatagagcagttaggaaacactctgtttgtaaagtctgtaagtggatattatgacatcatgtggccttctttggaaacgggatttcttcatattatgctagacagaagaattctcagtaacttccttgtgttgtgtgtattcaactcacagagttgaaccatcctttacacagagcagacttgaaacactctttttgtggaatttgcaagtggagatttcagccgctttgaggtcaatagtagaaaaggaaatatcttcgtagaaaaactagacagaatgattctcagaaactcctttgtgatgtgggtgttcaactcacagggtttaacctttcttttcatagagcagttaggaaacactctgtttgtaaagtctgcaagtggatattttcacctctttgaggccttcgttggaaacgggttttttttcatgtaaggctagacagaagaattctcagtaacttccttgtgttgtgtgtattcaactgacagagttggactttcatttagagagagcagatttgaaacactgtttttgtggaatttgcaagtggagatttcaagcgctttggggccaaaggcagaaaaggaaatatcttcgtataaaaactagacagaatcattctcagaaactgctgcgtgatgtgtgcgttcaactctcagagtttaacttttcttttcattcagcggtttggaaacactctgtttgtaaagtctgcacgtggatattttgaccacttagaggccttcgttggaaacgggtttttttcatgtaaggctagacagaaggaattcccagtaacttccttgtgttgtgtgcattcaactcacagagttgaacgttcccttagacagagcagatttgaaacactctatttgtgcaatttgcaagtgtagatttcaagcgctttaaagtcaatggcagaaaaggaaatatcttcgtttcaaaactagacagaatcattcccacaaactgcgttgtgatgtgttcgttcaactcacagagtttaacctttcttttcatagagcacttaggaaacagtctgtttgtaaattctgtaagtggatattctgacatacttgtggccttcgttggaaacgggatttcttcatattctgctagacagaataattctcagtaacttccttgtgttgtgtgtattcaactctcagagttgaacgatcctttacagagagcagacttgaaacactctttttgtggaatttgcaagtggagatttcagccgctttgaggtcaatggtagaataggaaatatcttcctatagaaactagacagaatgattctcagaaactcctttgtgatgtgtgcgttcaactcacagagtttaacctttcttttcatagagcagttaggaaacactctgtttgtaaagtctgcaagtggatattcagacctctttgaggccttcgttggaaacgggtttttttcatgtaaggctagacagaagaattcccagtaacttccttgtgttgtgtgtgttcaactcacagagttgaactttcatttacacagagcagatttgaaacactctttttgtggaatttgcaagtggagattacaagcgctttgaggccaaaggcagaaaaggaaatatcttcgtttcaaaactagacagaataattctcagaaactgctgcgtgatgtgtgcgttcaactctcagagtttaacttttcttttcattcagcggtttggaaacactctgtttgtaaagtctgcacgtggatattttggccacttagaggccttcgttggaaacgggtttttttcatgtaaggctagacagaagaattcccagtaacttccttgtgttgtgtgcattcaactcacagagttgaacgttcccttagacagaggagatttgaaacactctatttgtgcaatttgcaagtgtagttttgaagctctttaaggtcaacggcagaaaaggaaatatcttcgtttcaaaactagacagaatcattcccacaaactgcgttgtgatgtgttcgttcaactcacagagtttaacctttctgttcatagagcagttaggaaacactctgttgtaaagtctgtaagtggatattctgacatcttgtggccttcgctggaaacgggatttcttcatattctgctagacagaagaattctcagtaacttccttgtgttgtgtgtattcaactcacagagttgaacgatcctttacacagtgcagacttcaaacactctttttgtggaatttgcaagtggagatttcagccgctttgaggtcaatggtagaaaaggaaactatcttcatataaagactagacagaatgattctcataaactcctttgtgatgtgtgcgttcaactcacagagtttaacctttcttttcatagagcagttaggaaacactctgtttgtaaagtgtgcaagtggatattcagacctccttgaggccttcgttggaaacgggatttcttcatattctgctagacagaagaattctcagtaacttccttgtgttgtgtgtattcaactcacagagttgaacgatcctttacacagagcagacttgaaacactccttttgtggaatttgcaagtggagatttcagccgctttgaggtcaatggtagaaaaggaaactatgttcttacaaagactagacagaatcattctcagaaactgctctgcgatgtctgcgttcaactctcagagtttaacttttcttttcattcagcagtttggaaacactctgtttgtaaagtctgcacgtggatattttgaccacttagaggccttcgttggaaacgggtttttttcctgtaaggctagacagaagaattcccagtaacttccttgtgttgtgtgcattcaactcacagagttgaacgttcccttagacagagcagatttgaaacactctatttgtccaatttgcaagtgtagatttcaagcgctttaaggtcaacggcagaaaaggaaatatcttcgtttcaaaactagacagaatcattcccacaaactgcgttgtgatgtgttcgttcaactcacagagtttaacttttctgttcatagagcagttaggaaacaccctgtttgtaaagtctgcaagtggatattcagacctccttgaggccttcgttggaaacgggatttcttcatattctgctagacagaagaattctcagtaacttccttttgttgtgtgtattcaactcacagagttgaacgatcctttacacagagcagacttgaaacactctttttgtggaatttgcaagtggagatttcagccgctttgagttcaatggtagaataggaaatatctttctatagaaactagacagaatgattctcagaaactcctttgtgatgtgtgcgttcaactcacagagtttaacctttcttttcatagagcagttaggaaacactctgtttgtaaagtctgcaagtggatattcagacatctttgaggctttcgttggaaacgggatttcttcatattctgctagacagaagaattctcagaaacttccttgtgttgtgcgttttcaactcacagagttgaacgatcctttacacagagcagacttgaaacactccttttgtggaatttgcaagtggagatttcagccgctttgaggtcaatgttagaataggaaatatcttcctatagaaactagacagaatcattctcagaaactgctgcgtgatgtgtgcattcaactctcagagtttaacttttcttttcattcagcggtttggaaacactctgtttgtaaagtctgcacgtggaaattttgaccacttagaggccttcgttggaaacgggtttttttcatgtaaggctagacagaagaattcccagtaacttccttgtgttgtgtgcattcaactcacagagttgaacgttcccttagacagagcagatttgaaacactctatttgtgcaatttccaagtgtagatttcaagcgctttaaggtcaacggcagaaaaggaaatatcttcgtttcaaaactagacagaatcattcccacaaactgcgttgtgaggtgttcgttcaactcacagagtttaacctttcttttcatagagcagttaagaaacagtctgtttgtaaattctgtaagtggatattctgacatcttgtggccttcgttggaaacgggatttcttcatattctgctagacagaagaattctcagaatcttccttgtgttgtgtgtattcaactcacacagttgaacgattgtttacacagagcagatttgaaacactccttttgtggaatttgcaagtggagatttcagccgctttgaggtccatggtagaaaaggaaatatcttcgtataaaaactagacagaaggattctcagaaacttcattgtgacgtgtgcgttcaactcacagagtttaacctttcttttcatagagcagttaggaaacactctgtttgtaaagtctgcaagtggatattcagacctctttgaggccttcgttggaaaagggatttcttcatactgtgctagacagaagaattctcagtaacttccttgtgttgtgtgtattcaactgacagagttgtaatttcgtttagagagagcagatttgaaacactgtttttgtggaatttgcaagtggagatttcaagcgctttggggccaaaggcagaaaaggaaatatcttcgtataaaaactagacagagtcattctcagaaactgctgtgtgatgtgtgcgttcaactctcagagtttaacttttcttttcattcagcggtttggaaacactctgtttgtaaagtctgcacgtggaaattttgaccacttagaggccttcgttggaaacgggtttttttcatgtaaggctagacagaagaattcccagtaacttccttgtgttgtgtacattcaactcacagagttgaacgttcccttagacagagcagatttgaaacactctttttgtgcgattggcaagtggagatttcaagcgctttgaggtcaatggcagaaaaggaaatatcttcgtttcaaaactagacagaatgattctcagaaactcctttgtgatgtgtgcgttcaactcacagagtttaacatttcttttcatagagcagttaggaaacactttgtttgtaaactctgcaagtggatattcagacctcattgaggccttctttggaaacgggatttcttcatactatgctagacagaagaattctcagtaacttccttgtgttgtgtgtattcaactcaaagagttgaacgatcctttacacagagcagacttgaaacactctttttgtggaatttgcaattggagatttcagccgcgttgaggtcaatggtagaaaaggaaatatcttcgtataaaaactagacagaatgattctcagaaactcctttgtgatgtgtgtgttcaactcacagagtttaacctttcttttcatagagcagttaggaaacactctgtttgtaaagtctgcaagtggatattcagacctctttggggccttcgttggaaacgggtttttttcatgtaaggctagacagaagaattctcagtaacttccttgtgttgtgtgtattcaactcacagagttgaacgatcctttacacagagcagacttgaaacactctttttgcggaatttgcaagtggagatttcagccgctttgaagtccatggtagaaaaggaaatatcttcgtataaaaactagacagaatcattctcagaaactgctctgcgatgtgtgcgttcaactctcagagtttaacttttcttttcattcagcagtttggaaacactctgtttgtaaagtctgcacgtggatattttgaccatttagaggccttcgttggaaacgggtttttttcttgtaaggctagacagaagaattcccaggaacttccttgtgttatgtacattcaactcacagagttgaacgtttccttagacagagcagatttgaaacactctttttgtgcaattggcaagtggtgatttcacccgctttgaggtcaatggtagaaaaggaaatatcttcgtataaaaactagacataatcattcccacaaactgcgttgtgatgtgttcgttcaactcacagagtttaacctttctgttcatagagcagttaggaaacactctgtttgtaaagtctgtaagtggatattctgacatcttgtggcctacgttggaaacgggatttctccatattctgctagacagaagaattctcagtaacttccttgtgttgtgtgtatttaactcacagagttgaacgatcctttacacagagcagagttgaaacactctttttgtggaatttgcaagtggagatttcagccgctttgaggtcaatggtagaaaaggaaatatcttcgtataaagactagacagaatgattctcagaaactcctttgtgatgtgtgcgttcaacacacagagtttaacttttcttttcatagagacgttagtaaacactctgtttataaagtctgcaagtggatattcagacccctttgaggccttcgttggaaacgggatttcttcatattatgctagacagaagaattccgagtaacttccttgtgttgtgtgtgttcaactcacagagttgaactttcatttacacagaggagatttgaaacactctttttgtggaatttgcaagtggagatttcaagcgctttgaggccaaaggcagaaaaggaaatatcttcgtataaaaactagacagaatcattttcagaaactgctgcgtgatgtgtgcgttcaactctcagagtttaacttttcttttcattcagcggtttggaaacactctgtttgtaaagtctgcacgtggatattttgaccacttagaggctttcgttggaaacgggtttttttcatgtaaggctagacagaagaattcccagtaacttcattgtgttgtgtgcattcaactcacagagttgaacgttcccttagacagagcagatttgaaacactctatttgtgcaatttgcaagtgtagatttcaagcgctttaaggtcaatggcagaaaaggaaatatcttcgtttcaaaactagacagaatgattctcagaacctcctttgtgatgtgtgcgttcaactcacagagtttaacctttcttttcatagagcagttaggaaacactctgtttgtaaagtctgcaagtggatattcagacctccttgaggccttcgttggaaacgggatttcttcatattatgctagacagaataattctcagtaacttccttgtgttgtgtgtattcaactcacagagttgaacgatcctttacacagagcagacttgaaacactctttttgtggaatttgcaagtggagatttcagccgctttgaggttaatggtagaaaaggaaatatcttcgtataaagactagacagaatgattctcagaaactcctttgtgatgtgtgtgttcaactcacagagtttaacctttcttttcatagagcagttaggaaacactctgtttgtaaagtctgcaagtggatattcagccctctttgaggccttcgttggaaacgggtttttttcatataaggctagacagaagaattctcagtaacttccttgtgttgtgtgtattcaactgacagagttgaactttcatttagagagagcagatttgaaacactgtttttgtggaatttgcaagtggagatttcaagcgctttgggccaaaggcagaaaaggaaatatcttcgtataaaaactagacagaatcattctcagaaactgctgcgtgatgtgtgcgttcaactctcagagtttaacttttcttttcattcagcggtttggaaacactctgtttgtaaagtctgcaagtggatattttgaccacttagaggccttcgttggaaacgggtttttttcatgtaaggctagacagaagaattcccagtaacttccttgtgttgtgtgcgttcaactcacagagttgaactttcatttacacagagcagatttgaaacactctttttgtggaatttgcaaatggagatttcaagcgctttgaggccaaaggcagaaaaggaaatgtcttcgtttcaaaactagacagaatcattcccacaaactgcgttgtgatgtgttcgttcaactcacagagtttaacctttctgttcatagagcagttaagaaacactctgtttgtaaagtctgcaagtggatattcagacctcctagaggccttcgttggaaacgggatttcttcatattctgctagacagaagaattctcagtaacttccttgggttgtgtgtattcaactcacagagttgaacgatcctttacacagagcagacttgaaacactctttttgtggaatttgcaagtggagatttcagccgctttgaggtcaatggtagaaaaggaaatatcttcgtataaagactagacattatgattctcataaactcctttgtgatgtgtgcgttcaactcacagtgtttaacctttcttttcatagagcagttaggaaacactctgtttgtaaagtctgcaagtggatattcagacctctttgaggccttcgttggaaacgggatttcttcatattctgctacacagaagaattctcagtaacttcccttgtgttgtgtgtattcaactcagagagttgaacgatcctttacacagagcagacttgaaacactctttttgtggaatttgcaattggagatttcaggcgctttgaggtcaatagtagaaaaggaaatatcttcgtagaaaaactagacagaatcattctcagaaactgctctgcgatgtgtgcgttcaactctcagagtttaacttttcttttcattcagcagtttggaaacactctgtttgtaaagtctgcacgtggatattttgaccacttagaggccttcgttggaaacggttttttttcctgtaaggctagacagaagaattcccagtaacttccttgtgttgtgtacattcaactcacagagttgaacgttcccttagacagagcagatttgaaacactctttgtgcaattggcaagtggagatttcaagcgctttaaggtcaatggcagaaaaggaaatatcttcgtttcaaaactagacagaacgattctcagaaactcctttgtgatgtgtgcgttcaactcacagagtttaacctttcttttcatagagcagttaggaaacactctgtttgtaaagtctgcaagtggatattcagacctctttgaggccttcgttggaaacgggatttcctcatattctgctagacagaagaattctcagtaacttccttgtgttgtgtgtattcaactcacagagttgaacgatcctttacacagagcagacttgaaactctctttttgtggaatttgcaagtggagatttcagccgctttgaggtcaatagtagaaaaggaaatatcttcgtagaaaaactagacagaatgattctcagaaactcctttgtgatgtgtgcgttcaactcacagagtttaacctttcttttcatagagcagttaggaaacactctgtttgaaaagtctgcaagtggatactcagacctccttgaggccttcgttggaaacgggatttcttcatattatgctagacagaagaattctcagtaacttccttgtgttgtgtgtattcaactgacagagtggaacttttatttagagagagcagatttgaaacactgtttttgtggaatttgcaagtggagatttcaagcgctatggggccaaaggcagaaaaggaaatatctttgtataaaaactagacagaatcattctcagaaactgctctgtgatgtgtgcgatcaactctcagagtttaacttttcttttcattcagcagtttggaaacactctgtttgtaaagtctgcacgtggataatttgaccacttagaggccttcattggaaacgggtttttttcatgtaaggctagacagaagagttctcagtaacttccttgtgttgtgtgtattcaactcacacagttgaacgatcctttacagagagcagacttgtaacactctttttgtggaatttgcaagtggagatttcagccgctttgaagtcaaagtagaaaaggaaatatctgcctataaaaactagacagaatcattcccacaaactgcgttgtgatgtgttcgttcaactcacagagtttaacctttgttttcatagagcagttaggaaacactctgtttgtaaagtctgtaagtggatattctgacatcttgtggccttcgttggaaacgggatttcttcatattctgctagacagagaattctcagtaacttccttgtgttgtgtgtattcaactcacagagttgaacgatcctttacacagagcagacttgaaacactctttttgtggaatttgcaagtggagatttcagccgctttgaggtcaatggtagaataggaaatatcttcctatagaaactagacagaatgattctcagaaactactttgtgatgtgtgcgttcaactcacagagtttaacctttcttttcatagagcagttaggaaacactctgtttgtaaagtctgcaagtggatattcagacctctttgaggccttcgttggaaacgggatttcttcatattctgctagacagaagaattcccagtaacttccttgtgttgtgtgtgttcaactcacggagttgaactttgatttacacagagcagatttgaaacactctttttgtggaatttgcaagtggagatttcaagcgctttgaggccaaaggcaggaaagggaatatcttcatataaaaactagacagaatcattctcagaaactgctctgcgatgtgtgcgttcaactctcagagtttaacttttcttttcattcagcagtttggaaacactctgtaaagtctgcacgtggatattttgaccacttaaaggcgttcgttggaaacgggtttttttcctgtaaggctagacagaagaattcccagtaacttccttgtgttgtgtacattcaactcacagagttgaacgttcccttagacagagcagatttgaaacactctttttgtgcaattggcaagtggagatttcaagcgctttgaggtcaatggcagaaaaggaaatatcttcgtttcaaaactagacagaatcattcccacaaactgcgttgtgatgtgttcgttcaactcacagtttaacctttctgttcatagagcagttaggaaacactctgtttgtaaagtctgtaagtggatattctgacatcttgtggccttcgttggaaacgggatttcttcatattctgctagacagaagaattctcagtaacttccttttgttgtgtgtattcaactcacagagttgaacgatcctttacacagagcagacttgaaacactctttttgtggaatttccaagtggagatttcagccgctttgaggtcaatggtagaataggaaatatcttcgtagaaaaactagacagaatgattctcagaaactcctttgtgatgtgtgcgttcaactcacagagtttaacctttcttttcatagagcagttaggaaacactctgtttgtaaagtctgcaagtggatattcagacctctttgaggccttcgttggaaacgggtttttttcatataaggttagacagaagaattcccagtaacttccttgtgttgtgtgtgttcaactcacagagttgaactttcatttacacagagcagatttgaaacactcttttagtggaatttgcaaatggagatttcaagcgctttgaggccaaaggcagaaaaggaaatatcttcgtataaaaactagacagaatcattctcagaaactgctgcgtgatgtgtgcgttcaactctcagagtttaacttttcttttcattcagcggtttggaaacactctgtttgtaaagtctgcacgtggatattttgacaacttagaggccttcgttggaaacgggtttttttcatgtaaggctagacagaagaattctcagtaacttccttgtgttgtgtgtattcaactcacagagttgaacgatcctttacacagagcagacttgtaacactctttttgtggaatttgcaagtggagatttcagccgctttcaagtcaaaggtcgaaaaggaaatatcttcctataaaaactagacagaatgattctcagaaactcctttgtgatgtgtgcgttcaactcacagagtttaacctttctgttcatagagctgttaggaaacactctgtttgtaaagtctgcaagtggatattcagaactccttgaggccttcgttggaaacgggatttcttcatattctgctagacagaagaattctcagtaacttccttgtgttgtgtgtattcaactcacagagttgaacaatcctttacacagagcagacttgaaacactctttttgtggaatttgcaagtggagatttcagccgctttgaggtcaatggtagaaaaggaaacatctccgtataaagactagacagaatgattctcagaaactcctttgtgatgtgtgcgttcaactcaaagagtttaacctttcttttcatagagcagttaggaaacactctgtttgtaaagtctgcaagtggatattcagacatccttgaggctttctttggaaacgggatttcttcatattctgctagaaagaagaattctcagaaacttccttgtgttgtgtgttttcaactcacagagatgaacgatcctttacacagagcagacttgaaacactccttttgtggaatttgcaagtggagatttcagccgctttgaggtcaatggtagaataggaaatatcttcctatagaaagtagacagaatcattctcagaaactgctctgcgatgtgtgcgttcaactctcagagtttaacttttcttttcattcagcagtttggaaacactctgtttgtaaagtctgcacgttgataatttgaccacttagaggccttcgttggaaacgggtttttttcatataaggctagacagaagaattcccagtaacttccttgtgttgtgtgtattcaactcacagagttgaacgatcctttacacagagcagacttgtaacactctttttctggaatttgcaagtggagatttcagcctctttgaagtcaaaggtagaaaaggaaatatcttcctataaaaactagacagaacgattctcagaaactcctttgtgatgtgtgcgttcaactcacagagtttaacctttcttttcatagagcagttaggaaacactctgtttgtaaagtctgcaagtggatattcagacctccctgaggccttcgttggaaacgggatttcttcatattctgctacacagaagaattctcagtaacttcgttgtgttgtgtgtattcaactcacagagttgaacgatcctttacacagagcagacttgaaacactctttttgtggaatttgcaagtggagatttcagccgctttgaggtcaaaggtagaaaaggaaatatcttcgtataaagactagacagaatgattctcagaaactcctttgtgatgtgtgcgttcaactcacagagtttaacctttcttttcatagagcagttaggaaacactctgattgtaaagtctgcaagtggatattcagacctccttgaggccttcgttggaaacgggatttcttcatattctgctagacagaagaattctcagtaacttccttgtgttgtgtgtattcaactcacagagttgaacgatcctttacacagagcagacttgaaacactctttttgtggaatttgcaagtggagatttcagccgctctgaggtcaatggtagaataggaaatatcttcctatagaaaatagacagaatcattctcagaaactgctctgtgatgtgtgcgttcaactctcagagtttaacttttcttttcattcagcagtgtggaaaaactctgtttgtaaagtctgcacgtggatattctgaccacttagaggccttcgttggaaacgggtttttttcctgtaaggctagacagaagaattcccagtaacttccctgtgttgtgtacattcaactcacagagttgaacgttcccttagacagagcagatttgaaacacactttttgtgcaattggcaaatggagatttcaagcgctttaagttcaatggcagaaaaggaaatatcttcgtttcaaaactagacagaatcattcccacaaactgcgttgtgatgtgttcgttcaactcacagagtttaacatttctgttcatagagcagttaggaaacactctgtttgtaaagtctgcaagtggatattcagacctccttgaggccttcgttggaaacgggatttcttcttattctgctagacagaagaattcccagtaacttccttgtgttgtgtgtattcaactcacagagttgaatgatcctttacacagagaggacttgaaacactctttttgtggaatttgcaagtggagatttcagccgctttgaagtcaaaggtagaaaaggaaatatcttcgtataaaaactagacagaatgattctcagaaactcctttgtgatgtgtgcgttcaactcacagagtttaacctttcttttcttagagcagttaggaaacactctgtttgtaatgtctgcaagtggatattcatacctcctttaggccttcgttggaaacgggtttttttcatataaggctagacagaagaattctcagtaacttaccttgtgttgtgtgtattcaactgacagagttgaactttcatttagagagagcagatttgaaacactgtttttgtggaatttgcaagtggagatttcaagcgctttgcggccaaaggcagaaaaggaaatatcttcgtataaaaactagacagaatcattctcagaaactactgcgtgatgtgtgcgttcaactctcagagtttaacttttcttttcattcagcggtttggaaacactttgtttgtaaagtctgcacgtggatattttgaccacctagaggccttcgttggaaacgggtttttttcatgtaaggctagacagaagaattcccagtaacttccttgtgttgtgtacattcaactcacagagttgaacgatcccttagacagagcagatttgaaacactctttttgtggaatttgcaaatggagatttcaagcgctttgaggccaaaggcagaaaaggaaatatcttcgtataaaaactagacagaatcattcccacaaactgcgttgtgatgtgttcgttcaactcacagagtttaacctttctgttcatagagcagttaggaaacactctgtttgtaaagtctgcaagtggatattcagacctccttgaggccttcgttggaaacggtatttcttaatattctgctagacagaagaattctcagtaacttccttgtgttgtgtgtattcaactcacagagttgaacgatcctttacacagagcagacttgaaacactctttttgtggaattcgcaagtggatatttcagccgctttgaggtcaatggtagaataggaaatatcttcctatagaaactagacagaatgattctcagaaactcctttgtgatgtgtgcgttcaactcacagagttcaacttttcttttcatagagcagttaggaaacactctgtttgtaaagtctgcaagtggatattcagacctctttgaggccttcgttggaagcgggatttcttcatattatgctagacagaagaattctcagtaacttccttgtgttgtgtgtattcaactaacagagttgaactttcatttagagagagcagatttgaaacactgtttttgtggaatttgcaagtggagatttcaagcgctttggggccaaaggcagaaaaggaaatatcttcgtataaaaactagacagaatcattctcacaaactgctctgcgatgtgtgcgttcaactctcagagtttaacttttcttttcattcagcagtttggaaacactctgtttgtaaagtctgcacgtggatattttgaccacttagaggccttcgttggaaacgggtttttttcctgtaaggctagacagaagaattcccagtaacttcccttgtgttgtgtacattgaactcacagagttgaacgttcccttagacagagcagatttgaaacactctttttgtgcaattggcaagtggagatttcaagcgctttaaggtcaatggcagaaaaggaaatatcttcgtttcaaaactagacagaatcattcccacaaactgtattgtgatgtgttcgttcaactcacagagtttaacctttcttttcatagagcagttaggaaacagtctgtttgtaaattctgtaagtggatattctgacatcttgtggccttcgttggaaacgggatttcttcatattctgctagtcagaagaattctcagtaacttccttgtgttgtgtgttttcaactcacagagttgaacgatcctttacacagagcagacttgaaacactctttttttggaatttgaaagtggagatttcagccgctttgaggtcaatggtagaaaaggaaactatcttcgtataaagactagacagaatgattctcagaaactcctttgtgatgtgtgcgttcaactcacagagtttaacctttcttttcatagagcagttaggaaacactctgtttgtaaagtctgcaagtggatattcagacctctttgaggccatcgttggaaacgggatttgttcatattctgctagagagaagaatccccagtaacttccttgtgttgtgtgtgttcaactcacagagttgaactttcatttacacagagcagatttgaaacactctttttgtggaatttgcaagtggagatttcaagcgctttgaggccaaaggcagaaaaggaaatatcttcgtttcaaaactagacagaatcattctcagaaactgctgcgtgatgtgtgcgttcaactctcagagtttaacttttccttttcattcagcggtttggaaacactctgtttgtaaagtctgcacgtggatattttgaccacttagaggccttcgttggaaacgggtttttttcatgtaaggctagacagaagaattctcagtaacttccttgtgttgtgtgtattcaactcacagagttgaacgatcctttacacagagcagaacgatcctttacacagagcagacttgaaacattctttttgtggaatttgcaagtggagatttcaaccgctttgaggtcaatggtagaataggaaatatcttcctatagaaactagacagaacgattctcagaaactcctttctgatgtgtgcgttcaactcacagagtttaacctttcttttcatatagcagttaggaaacactctgtttgtaaagtctgcaagtggatattcagacctctttgaggccttcgttggaaacgggatttcttcatattctgctagacagaataattctcaataacttccttgtgttgcgtgtattcaactcttagagttgaacgatcctttacagagagcagacttgaaacactctttttgtggaatttgcaagtggagatttcagccgctttgaggtcaatggtagaataggaaatatcttcctatagaaactagacagaatgattctcataaactcctttgtgatgtgtgcgttcaactcacaaagtttaacttttcttttcatagagcagttaggaaacactctgtttgtaaagtctgcaagtggatattcagacctctttgaggccttcgttggaaacgggatttcttcatattatgctagacagaagaattctcagtaacttccttgtgttgtgtgtattcaactcacagagttgaacgatcctttacacagagcagacttgaaacattctttttgtggaatttgcaactggagatttcagccgcttagaggtcaatggtagtataggaaatatcttcctatagaaactagacacaatcattctcagaaagtgctctgcgatgtgtgcgttcaactctcagagtttaactttgcttttcattcagcagtttggaaacactctgtttgtaaagtctgcacgtggataatttgaccacttagaggccttcgttggaaacgggtttttttcatgtaaggctagacagaataattcccagtaacttccttgtgttgtgtacattcaactcacagagatgaacgttcccttagacagagcagatttgaaacactctttttgtgcaattgacaagtggagatttcaagcgctttaaggtcactggcagaaaaggaaatatcttcgtttcaaatgtagacagaatgattcccacaaactgcgttgtgatgtgttcgttcaactcacagagtttaacctttcttttcatagagcagttaggaaacactctgtttgtaaattctgcaagtggatattcagacctctttgaggccttcgttgcaaacgggatttcttcatattatgcctgacagaagaattctcagtaacttccttgtgttgtgtgtattcaactcacagagttgaacgatcctttacacagagcagacttgaaactctctttttgtggaatttgcaagtggagatttcagccgctttgagttcaatggtagaataggaaatatcttcctatagaaactagacagaatgattctcagaaactcctttgtgatgtgtgcgttcaactcacagtagtttaacgtttcttttcatagagcagttaggaaacactctgtttctaaagtatgcaagtggatattcagacctctttgaggccttcgttggaaacgggtttttttcatataaggctagagagaagaattctcagtaacttccttgtgttgtgtgtattcaactgacagagttgaactttcatttagagagagctgatttgaaacactgtttttgtggaatttgcaagtggagatttcaagcgctttggggccaaaggcagaaaaggaaatatcttcgtataaaaactagacagaatcattctcagaaactgctgcatgatgtgtgcgttcaactctcagagtttaacttttcttttcattcagcggtttggaaacactctgtttgtaaagtctgcacgtggatattttgaccacttagaggccttcgttggaaacgggttttttttcatgtaaggctagacagaagaattcccagtaacttccttgtgttgtgtacattcaactcacagagttgaacgttcccttagacagagcagatttgaaacactctttttgtgcaattggcaagtggagatttcaagcgctttgaggtcaatggcagaaaaggaaatatcttcgtttcaaaactagacagaatgattctcagaaactcctttgtgatgtgtgcgttcatctcacagagtttaacttttcttttcatagagcagttaggaaacactctgtttgtaaagtctgcaagtggatattcagacctctttgaggccttcgttggaaacgggattcttcatattatgctagacagaataattctcagtaacttccttgtgttgtgtgtattcaactcacagagatgaacgatcctttacagagagcagacttgaaacactctttttgtggaatttgcaagtggagatttcagccgctttgaggtcaatggtagaaaaggaaatatcttcgtataaagactagacagaatgattctcagaaactcctttctgatgtgtgtgttcaactcacagagtttaacctttcttttcatagagcagttagtaaacagtctgtttataaagtctgcaagtggatattcagacccctttgaggccttcgttggaaacgggatttcttcatattatgctagacagaagaattcccagtaacttccttgtgttgtctgtgttcaactcacggagttgagctttcatttacacagagcagatttgaaacactctttttgtggaatttgcaagtggagatttcaagcgctttgaggccaaaggcagaaaaggaaatatcttcgtataaaatctagacagaatcattctcagaaactgctctgtgatgtgtgcgttcaactctcagagtttaacttttcttttcattcagcagtttggaaacactctgtttgtaaagtctgcacgtggatattttgaccacttagaggccttcgttggaaacgggttttcttcatgtaaggctagacagaagaattcccagtaacttccttgtgttgtgtgcattcaactcacagagttgaacgttcccttagacagagcagatttgaaacagcctatttgtgcaatttgcaagtgtagatttcaagcgctttaaggtcaacggcagaaaaggaaatatcttcctttcaaaactagacagaatcattcccacaaactgcgttgtgatgtgttcgttcaactcacagggtttaacctttctgttcatagagcagttaggaaacactctgtttgtaaagtctgcaagtggatattcagacctccttgaggccttcgttggaaacgggatttcttcatattctgctagacagaagaattctcagtaacttccttgtgttgtgtgtattcaactcacagagttgaacgatcctttacacagagcagacttgaaacactctttttgtggaatttgcaagtggagatttcagccgctttgagttcaatggtagaataggaaatatcatcctatagaaactagacagaatgattctcagaaactcctttgtgatgtgtgcgttcaactcacagagtttaacctttcttttcatagagcagttaggaaacactctgtttgtaaagtctgcaagtggatattcagacctctttgaggtcttcgttggaaacgggtttttttcatataaggctagacagaagaattcccagtaacttcccttgtgttgtgtgtgttcaactctgtgagttgaactttcatttacacagagcagattggaaacactctttttgtggaatttgcaagtggagatttcaagcgctttgaggccaaaggcagaaaaggaaatatcttcgtataaaaactagacagaatcattctcagaaactgctctgcgatgtgtgcgttcaactctcagagtttaacttttgttttcattcagcagtttggaaacactctgtttgtaaagtctgcacgtggatattttgagcacttagaggccttcgttggaaacgggtttttatcctgtaaggctagacagaagaattcccagtaacttccttgtgttgtgtacattcaactcacagagttgaacgttcccttagacagagcagatttgaaacactctttttgtgcaattggcaagtggagatttcaagcgctttaaggtcaatggcagaaaaggaaatatcttcgtttcaaaactagacagaatgattctcagaaactcctttgtgatgtgtgcgttcaactcacagagtttaacttttcttttcatagagcagttaggaaacactctgtttgtaaagtctgcaagtggatattcagacctctttgaggctttcgttggaaacgggatttcttcatattctgctagacagaagaattctcagaatcttccttgtgttgtgtgtattcaactcacagagttgaacgatcctttacacagagcagacttgtaacactctttttgtggaatttgcaagtggagatttcagccgctttgaggtccatggtagaaaaggaaatatcttcgtataaaaactagacagaatgattctcagaaactcctttgtgatgtgtgcgttcaactcacagagtttaacctttcttttcatagagcagttaggaaacactctgtttgtaaagtctgcaagtggatattcagacctccttgaggccttcgttggaaacgggttttgttcatattatgctagacagaagagttctcagtaacttccttgtgttgtgtgtattcaactcacacagttgaactttcatttacacagagcagatttgaaacactctttttgtggaatttgcaggtggagatttcaagcgctttgaggccaaaggcagaaaaggaaatatcttcgtataaaaactagacagaatgattctcagaaacttctttgtgatgagtgcgttcaactcacagagtttaacctttcttttcatcgagtagttaggaaacactctgtttgtaaagtctgcaagtggatattttgacctctttgaggctttcgttggaaacgggtttttttcctgtaaggctagacagaagaattcccagtaacttccttgtgttgtgtacattcaactcacagagttgaacgttcccttagacagagcagatttgaaacactctttttgtgcaattggcaagtggagatttcaagcgctttaaggtcaatggcagaaaaggaaatatcttcgtttcaaaactagacagaatgattctcagaaactcctttgtgatgtgtgcgttgaactcacagagtttaacctttctgttcatagagcagttaggaaacactctgtttgtaaagtctgtaagtggatattctgacatcttgtggccttcgttggaaacgggatttcttcatattctgctagacagaagaattctcagtaacttccttgtgttgtgtgtattcaactcacagagttgaacaatcctttacacagagcagacttgaaacactctttttgtggaatttgcaagtggagatttcagccgctttgaggtcaatggtagaaaaggaaactatcttcatataaagacttgacagaatgattctcagaaactcctttgtgatatgtgcgttcaactcacagagtttaacctttcttttcatagagcagttaggaaacactctgtttgtaaaatctgcatgtggatatttggacttctttgaggccttcgttggaaacgggtttttttcatgtaaggctagacagaagaattcccagtaacttccttgtgttgtgtgtgttcaactcacagagttgaactttgatttacacagagcagatttgaaacactctttttgtggaatttgcaaatggagatttcaagcgctttgaggccaaaggcagaaaaggaaatatctttgtataaaaactagacagaatgattctcagaaactcctttgtgatgtgtgcgttcaactcacagagttcaacctttcttttcatagagcagttgggaaacactctgttagtaaagtctgctagtggatattcagacctctttgaggccttcgttggaagcgggatttcttcatattctgctagacaaaagaattctcagtaacttccttgtgttgtgtgtattcaactcacagaattgaacgatcctttacacagagcagacttcaaacactctttttgtggaatttgcaagtggagatttcagccgctttgaggtcaatggtagaaaaggaaatatcttcgtataaaaactagacagaatgattctcagaaactcctttgtgatgtgtgcgttcaactcacagagtttaacctttcttttcatagagcagttaggaaacactctgtttgtaaagtctgcaagttgatattcagacctccttgaggccttcgttggaaacgggatttcttcatattatgctagacagaagaattctcagtaacttccttgtgttgtgtgtattcaactcacagagttgaacgatcctttacacagagcagacttgaaacactctttttgtggaatttgcaagtggagatttcagccgctttgaggtcaatggtagaaaaggaaatatcttcgtataaaaacgagacagaatgattctcagaaacttctttgtgatgtgtgcgttcaactcacagagtttaacctttctgttcatagtgcagttaggaaacactctgtttgtaaactctgcaagtggatattcagacctctttgaggccttcgatggaaacgggatttctccatactgtgctagacagaagaattcccagtaacttccttgtgttgtgtgtgttcaactcacagagttgaactttcatttacacagagcagatttgaaacactctttttgtggaatttgcaagtggagatttcaagcggtttgaggccaaaggtagaaaaggaaatatcttcgtttcaaaactagacagaatcattctcagaaactgctctgcgatgtgtgcgttcaactctcagagtttaacttttcttttcattcagcagtttggaaacactctgtttgtaaattctgcacgtggatattttgaccacttagaggccttcgttggaaacgggtttttttcctgtaaggctagacagaagaaatcccagtaacttccttgtgttgtgtgcattcaactcacagagttgaacgttcccttagacagagcagatttgaaacactctatttgtgcaatttccaagtgtagatttgaagcgctttaaggtcaacggcagaaaaggaaatatcttcgtttcaaaactagacagaaatcattctcataaactgctctgcgatgtgtgcgttcaactctcagagtttaacttttcttctcattcagcagtttggaaacactctgtttgtaaagtctgcacgtggataatttgaccacttagaggccttcgttggaaacgggtttttttcatgtaaggctagacagaagaattctcagtaacttccttgtgttgtgtgtattcaactcacagagttgaacgatcctttacacagagcagacttgtaacactctttttgtggaatttgcaagtggagatttcagccgctttgaagtctaaggtagaaaaggaaatatcttcctataaaaactagacagaatgattctcagaaactcctttgtgatgtgtgcgttcaactcacagagtttaacctttcttttcatagagcagttaggaaacactctgtttgtaaagtctccaagtggatattcagacctctttgaggccttcgttggaaacgggtttttttcatataaggctagacagaagaattcccagtaacttccttgtgttgtgtgtgttcaactcacagagttgaactttcgtttacacagagcagatttgaaacactctttttgtggaatttgcaaatggagatttcaagcgctttgaggccaaaggcagaaaaggaaatatcttcgtataaaaactagacagaatcattctcagaaactgctgcgtgatgtgtgcgttcaactctcagaatttaacttttcttttcattcagcggtttggaaacactctgtttgtaaagtctgcacgtggaaattttgaccacttagaggccttcgttggaaacgggtttttttcatgtaaggctagacagaagaattcccagtaacttccttgtgttgtgtgcattcaactcacagagttgaacgttcccttagacagagcagatttgaaacactctatttgtgcaatttgcaagtgtagatttcaagcgctttaaggtcaatggcagaaaaggaaatatcttcgtttcaaaactagagagaatgattctcagaaactcctttgtgatgtgtgcgttcaactcacagagtttaacctttcttttcatagagcagttaggaaacactctgttggtaaagtctgcaagtggatattcagacctctttgaggccttcgttggaagcgggatttcttcatgttctgctagacagaagaattctcagaaacttccttgtgttgtgtgttttcaactcacagagttgaacgatgctttacacagagtagacttgaaacactctttttgtgtaatttgcaagtggagatttcatccgctttgaggtcaatggtagaaaaggaaatatcttcgtataaaaactagacagaatgattctcagaaactcctttgtgatgtgtgtgttcaactcacagagtttaacgtttcttttcatagagcagttagtaaacactctgtttataaagtctgcaagtggatattcagacccctttgaggccttcgttggaaacgggatttcatcatattatgctagacagaagaattctcagtaacttccttgtgttgtgtgtattcaactgacagagttgaactttcatttagagagagcagatttgaaacactgtttttgtggaatttgcaagtggagatttcaagcgctttggggccaaaggcagaaaaggagatatcttcgtataaaaactagacagaatgattctcagaaactcctttgtgatgtgtgcgttcaactctcagagtttaacttttcttttcattcagcagtttggaaacactctgtttgtaaagtctgcacgtggatattttgaccacttagaggccttcgttggaaacgggtttttttacctgtaaggctagacagaagaattcccagtaacttccttgtgttgtgtgcattcaactcacagagatgaacgttcccttagacagagcagatttgaaacactctatttgtgtaatttgcaagtgtagatttcaagcgctttaaggtcaatggcagaaaaggaaatatctccgtttcaaaactagacagaatcattcccacaaactgcgttgtgatgtgttcgttcaactcacagagtttaacctttccgttcatagagcagttaggaaacacactgtttgtaaagtctgtaagtggatattctgacatcttgtggccttcgttggaaacgggatttcttcatattctgctagacagaagaattctcagtaacttccttgtgttgtgtgtattcaactcacagagttgaacgatcctttacacagagcagacttgtaacactctttttgtggaatttgcaattggagatttcagccgctttgaagtcaaaggtagaaaaggaaatatcttcctataaaaactagacagaatgattctcagaaactcctttgtgatgtgtgcgttcaactcacagagtttaacctttcttttcatagagcagttaggaaacactctgtttgtaaagtctgcaagtggatattcagacctctttgaggccttcgttggaaatgggtttttttcatataaggctagagagaagaattctcagtaacttccttgtgttgtgtgtattcaactgacagagttgaactttcatttagagagagcagatttgaaacactgtttttgtggaatttgcaagtggagatttcaagcgctttggggccaaaggcagaaaacgaaatatcttcgtataaaaactagacagaatcattctcagaaactgctctgcgatgtgtgcgttcaactctcagagtttaactttgcttttcattcagcagtttggaaacactctgtttgtaaagtctgcacgtggatattttgaccacttagaggccttcgttggaaacgtgtttttttcctgtaaggctagacagaagaattcccagtaacttccttgtgttgtgtacattcaactcacagagttgaacgttcccttagacagagcagatttgaaacactctttttgtgcaattggcaagtggagatttcaagcgctttaaggtcaatggcagaaaaggaaatatcttcgtttcaaactagacagaatcattctcagaaactgctctgtgatgtgtgcgttcaactctcagagtttaaattttcttctcattcagcagtttggaaacactctgtttgtaaagtctgcacgtggataatttgaccacttagaggccttcgttggaaacgggtttttttcatgtaaggctagacagaagaattctcagtaacttccttgtgttgtgtgtattcaactcacagagttgaaagaccctttacacagagcagacttgaaacactctttttgtggaatttgcaagtggagatttcagccgctttgaagtcaaaggtagaaaaggaaatatcttcgtataaaaactagatagaatgattctcataaactcctttgtgatgtgtgcgttcaactcacagagtttaacctttcttttcatagagcagttaggaaacactctgtttgtaaagtctgcaagtggatattcagacctctttgaggccttcgttggaaactggatttcttcatattctgctagacagaagaattcccagtaacttccttgtgttgtgtgtgttcaactcacagagttgaactttcatttacacagagcagatttgaaacactctttttgtggaatttgcaaatggagatttcaagcgctttgaggccaaaggcagaaaaggaaatatcttagtataaaaactagacagaatgattctcagaaactgctctgtgatgtgtgcgttcaactctcagagtttaacttttcttttcattcagcagtttggaaacactctgtttgtaaagtctgcacgtggataatttgaccacttagaggccttcgttggaaacgggtttttttcaagtaaggctagacagaagaattcccagtaacttccttgtgttgtgtgcattcaactcacagagttgaacgttcccttagacagagcagatttgaaacactctatttgtgcaatttgcaagtgtagatttcaagcgctttaaggtcaacggcagaaaaggaaatatcttcgtttcaaaactagacagaatcattcccacaaactgcgttgtgatgtgttcgttcaactcacagagtttaacctttcttttcatagagcagttaggaaacagtctgtttgtcaattctgtaagtggatattctgacatcttgtggcctttgttggaaacgggatttcttcatattctgctagacagaagaattctcagaatcttccttgtgttgtgtgtattcaactcacagagtttaacgatcctttacacagagcagacttgaaacactctttttgtggaatttgcaagtggagatttcagccgctttgaggtccatggtagaaaaggaaatatcttcgtataaaaactagacagaatgattctcagaaactcctttgtgatgtgtgcgttcaactcacacagtttaacctttcttttcatagagcagttgggaaacactctgtttgtaaaatctgcaagtggatattcagacctccttgcggccttcgttggaaacgggatttcttcatattatgctagacagaataattctcagtaacttccttgtgttgtgtgtattcaactcacggagttgaacgatcctttacacagagcagacttgaaacactctttttgtggaatttgcaagtggagatttcagccgctttgaagtcaatggtagaataggaaatatcttcctatagaaactaggcagaatcattctcagaaactgctgcgtgatgtgtgcgttcaactctcagagtttaacttttcttttcattcagcggtttggaaacactctgtttgtaaagtctgcacgtggatattttgaccacttagaggccttcgttggaaacgggtttttttcatgtaaggctagacagaagaattcccagtaacttccttgtgttgtgtgcattcaactcacagagttgaacgttccctgagacagagcagatttgaaacactctatttgtgcaatttgcaagtgtagatttcaagcgctttaaggtcaacggcagaaaaggaaatatcttcgtttcagaactagacagaatcattcccacaaactgcgttgtgatgtgttcgttcaactcacagcagtttaacctttctgttcatagagcagttaggaaacactctgtttgtaatgtctgtaagtggatattctgacatcttgtggccttcgttggaaacgggatttcttcatattctgctagacagaagaattctcagtaacttccttgcgttgtgtttattcaactcacagagttgaatgatcctttacacagagcagacttgaaacactctttttgtggaatttgcaagtggagatttcagccgctttgaggtcaatggtagaaaagtaaatatcttcgtataaggactagacagaatgattctcagaaactcctttgtgatgtgtgcgttcaactcacagagttcaacctttcttttcatagagcagttgggaaacactctgtttgtaatgtctgcaagtggatattcagacttctttgaggccttcgttggaagcgggatttcttcatattctgctagacagaagaattcccagtaacttccttgtgttgtgtgtgttcaactcacagagttgaactttcatttacccagagcagatttgaaacactctttttgtggaatttgcaagtggagatttcaagcgctttgagcccaaaggcagaaaaggaaatatcttcgtttcaaaactagacagaatcattctcagaaactgctgcgtgatgtgtgcgttcaactctcagagtttaacttttcttttcattcagcggtttggaaacactctgtttgtaaagtctgcacgtggaaattttgaccacttagagaccttcattggaaacgggtttttttcatgtaaggctagacagaagaattcccagtaacttccttgtgttgtgtacattcaactcacagagttgaacgttcccttagacagagcagatttgaaacactctttttgtgcaattggcaagtggagatttcaagcgctttaaggtcaatggcagaaaaggaaatatcttcgtttcaaaactagacagaatgattctcagaaactcctttgtgatgtgtgcgttcaactcacagagtttaacctttcttttcatagagcagttaggaaacactctgtttgtaaagtctgcaagtggatattcagacctccttgagtccttcgttggaaacgggatttcttcatattatgctagacagaagaattctcagtaacttccttgtgttgtgtgtattcaactcacagagttgaacgatcctttacacagagcagacttgaaacactctttttgtggaatttgcaagtggagatttcagccgctttgaggtcaattgtagaataggaaatatcttcctatagaaactagacagaatgattctcagaaactcctttgtgatgtgtgcgttcaactcacagagttcaacctttcttttcatagagcagttgggaaacactctgtttgtaaagtctgcaagtggatattcagacttcttagaggccttcgttggaagcgggatttcttcatattctgctagacagaagaattcccagtaacttccttgtgttgtgtgtgttcaactcacagagttgaactttcatttacacagagcagatttgaaacactctttttgtggaatttgcaagtggagatttcaagcgctttgaggccaaaggcaggaaaggaaatatcttcgtataaaaactagacagaatcattctcagaaactgctctgcgatgtgtgcgttgaactctcagagtttaacttttcttttcattcagcaatttggaaacactctgtttgtaaagtctgcacgtggatattttgaccacttagaggccttcgttggaaacgggtttttttcctgtaaggctagacagaagaattctcagtaacttccttgtgttgtgtgtattcaactcacagagttgaacgatcctttacacagagcagacttgtaacactctttttctggaatttgcaagtggagatttcagccgctttgaagtcaaaggtagaaaaggaaataacttcctataaaaactagacagaatgattctcagaaacttctttgtgatgtgtgcgttcaactcacagagtttaacctttcttttcatagagcagttaggaaacactctgtttgtaaactctgcaagtggatattcagacctctttgaggccttcgttgcaaacgggatttcttcatgctatgctagacagaagaattctcactaacttccttgtgttttgtgtattcaactcacagagttgaacgatcctttacacagagcagacttgaaacactctttttgtggaatttgcaagtggagatttcagccgctttgaggtcaatggtagaaaaggaaatatcttcgtataaagactagacagatagattctcagaaactcctttgtgatgtgtgcgttcaactcacagagtttaacctttcttttcatagagcagttaggaaacactctgtttgtaaagtctgcaagtggatattcagacctctttgaggccatcgttggaaacgggtttttttcatataaggctagacagaagaattcccagtaacttccttgtgttgtgtgtgttcaactcacagagttgaactttcatttacacagagcagattggaaacactctttttgtggaatttgcaaatggagatttcaagcgctttgaggccaaaggcagaaaaggaaatatcttcgtataaaaactagacagaatcattctcagaaactgctctgcgatgtgtgcgttcaactctcagagtttaacttttcttttcattcagcagtttggaaacactctgtttgtaaagtctgcacgtggatattttgaccacttagaggccttcgttggaaacgggtttttttcctgtaaagctagacagaagaattcccagtaacttccttgtgttgtctacattcaactcacagagttgaacgttcccttagacagagcagatttgaaacactctttttgtgcaattggcaagtggtgatttcagccgctttggggtcaatggtagaaaaggaaatatcttcgtataaaaactagacagaatgattctcagaaacttcattgtgaagtgtgcgttcaactcacagagtttaacctttcttttcatagagcagttaggaaacactctgtttgtaaagtctgcaagtggatattcagacctctttgaggccttcgttggaaacgggatttcttcatactgtgctatacagaagaattctcagtaacttcattgtgttgtgtgtattcaactcacagagttgaacgatcctttacacagagcatacttgaaacactcttgttgtggaatttgcaagtggagatttcagccgctttgaggtcaatggtagaataggaaacatcttcctatagaaactagacagaatgattctcagaaactccttagtgatgtgtgtgtccaactcacagggtttaacctttcttttcatagagcagttagcaaacactctgtttgtaaagtctgcaagaggatattcagacctttttgaggccttcgttggaaacgggtttttttcatataaggctagacagaagaattcccagtaacttccttgtgatgtgtgtgttcaactcacagagttgaactttcatttacatagagcagatttgaaacactctttttgtggaatttgcaagtggagatttcaagcgctttgaggccaaaggcagaaaaggaaatatcttcgtataaaaactacacagaatcattctcagaaactgctgcgtgatgtgtgcgttcaactctcagagtttaacttttcttttcattcagcagtttggaaacactctgtttgtaaagtctgcacgtggaaattttgaccacttagaggccttcgttggaaacgggtttttttcatgtaaggctagacagaagaattcccagtaacttccttgtgttgtgtacattcaactcacagagttgaacgttcccttagacagagcagatttgaaacactctttttgtacaattggcaagtggagatttcaagcgctttaaggtcaaaggcagaaaagaaaatatcttcgtttcaaaactagacagaatcattcccacaaactgcgttgtgacgtgttcgttcaactcacagagtttaacctttctgttcatagagcagttaggaaaaactctgtttgtaaagtctgtaagtggatattctgacatcttgtggccttcgttggaaacgggatttcttcatattctgctagacagaagaattctcagtaacttccttgtgttgtgtctattcaactcacagagttgaacgatcctttacacagagcagacttgaaacactctttttgtggaatttgcaagtggagatttcagccgctttgaggtcaatggtagaaaaggaaatatcttcgtataaagactagacagaatgattctcagaaactcctttgtgatgtgtgcgttcaactcacagagtttaacgtttctgttcatagagctgttaggaaacactctgtttgtaaagtctgcaagtggatattcagacctccttgaggccttcgttggaaacgggatttcttcatattctgctagacagagtaattctcagtaacttccttgtgttgtgtgtattcaactcacagagttgaacgatcctttacacagagcagatttgtaacactctttttgtggaatttgcaagtggagatttcaagcgctttgaggccaaaggcagaaaaggaaatatcttcgtttcaaaactagacagaatcattctcagaaactgctctgcgatgggtgcgttcaactctcagagtttaacttttcttttcattcagcagtttggaaacactctgtttgtaaagtctgcacgtggataacttgaccacttagaggacttcgttggaaacgggtttttttcctgtaaggctagacagaagaattcccagtaacttccttgtgttgtgtacattcaactcacagagttgaacgttcccttagacagagcagatttgaaacactctttttgtgcaattggcaaatggagatttcaatcgctttaaggtcaatggcagaaaaggaaatatcttcgtttcaaaactagacagaatcattcccacaaactgcgttgtgatgtgttcgttcaactcacagagtttaacctttcttttcttagagcagttaggaaacagtctgtttgtcaattctgtaagtggatattctgacatcttgtggccttcgttggaaacgggatttcttcatattctgctagacagaataattctcagtaacttcccttgtgttgtgtgtattcaactcacagagttgaacgatcctttacacagagcagacttgaaacactctttttgtggaatttgtaagtggagatttcagccgctttgaggtcaatggtagaataggaaatatcttcctatagaaactagacagaatgattctcagaaactcctttgtgatgtgtgcgttcaactcacagagtttaacctttcttttcatagagcagttaggaaacactctgtttgtaaagtctgtaagtggatattcagacctccttgaggccttcgttggaaacgggatttcttcctattatgctagacagaagaattctcagtaacttccttgtgttgtgtgtattcaactcacagagttgaacgatcctttacacagagcagacttgaaacacactttttgtggaatttgcaagtggagatttcagccgctttgggttcaatggtagaataggaaatatcttcctatagaaactagacagaatcattctcagaaactgctctgcgatgtgtgcgttcaactctcagagtttaacttttcttttcattcagcagtttggaaacactctgtttgtaaagtctgcacgtggatactttgaccacttagaggccttcgttggaaacgggtttttttcctgtaaggctagacagaagaattcccagtaacttccttgtgttgtgtgcattcaactcacagagttgaacgttcccttagacagagcagatttgaaacatcctatttgtgcaatttgcaagtgtagatttcaagcgctttaaggtcaacggcagaaaaggaaatatcttcctttcaaaactagacagaatcattcccacaaactgcgttgtgatgtgttcgttcaactcacagagtttaacctttcttttcatagagcagttaggaaacagtctgtttgtaaattttgtaagtggatattctgacatcttgtggccttcgttggaaacgggatttcttcatattctgctagacagaagaattctcagtaacttccttgtgttgcgtgtattcaactcacagagttgaacgatcctttacccagagcggacttgaaacactctttttgtggaatttgcaagtggagatttcagccgctttgaggtcaatggtagaaaaggaaatatcttcttatacagactagacagaatgattctcagaaactcctttgtgatgtgtgcgttcaactcacagagttcaacctttcttttcatagagcagttgggaaacactctgtttgtaaagtctgcaagtggatattcagacctccttgaggccttcgttggaaacgggatttcttcatattctgctagacagaagaattcccagtaacttccttgtgttgtgtgtgttcaactcacagagttaaactttcatttacccagagcagatttgaaacactctttttgtggaatttgaaagtggagatttcaagcgctttgaggccaaaggcagaaaaggaaatatcttcgtttcaaaactagacagaatcattctcagaaagtgctctgcgatgtgtgcgttcaactctcagagtttaactttgcttttcattcagcagtttggaaacactctgtttgtaaagtctgcacgtggataatttgaccacttagaggccttcgttggaaacgggtttttttcatgtaaggctagacagaagagttctcagtaacttccttgtgttgtgtgtattcaactcacacagttgaacgatcctttacagagagcagacttgtaacactctttttgtggaatttgcaagtggagatttcagccgctttgaagttaaagtagaaaaggaaatatcttcctataaaaactagacagaatgattctcagaaactcctttgtgatgtgtgcgttcaactcacagagtttaacctttcttttcatggagcagttaggaaacacactgtttgtaaagtctgcaagtggatattcagacctccttgaggccttctttggaaacgggatttcttcatattctgctagacagaataattctcagtaacttccttgtgttgtgtgtattcaactcacagagttgaacgatcctttacacagagcagacttgaaacactctttttgtggaatttgcaagtggagatttcagccgctttgaggtcaatggtagaaaaggaaatatcttcgtataaagactagacagaatgattctcagaaactcctttttgatgtgtgcgttcaactcacagagtttaacctttcttttaatagagcaattaggaaacactctgtttctaaagtctgcaagtggatattcagacctcttagcggccttcgttggaaacgggatttcttcatattttgctagacagaagaattctcagtaacttccttgtgttgtgtgcattcaactcacagagttgaacgatcctttacacagagcagattggaaacactctttttgtggaactgcaagaggagatttcagccgctttgaggtcaatggtagaaaaggaaatatcttcgtataaaaactagacagaatcattctcagaaactgctctgcgatgtgtgcgttcaactctcagagtttaacttttcttttcattcagcagtttggaaacactctgtttgtaaagtctgcacgtggatattttgaccacttagaggccttcgttggaaacgggtttttttcctgtaaggctagagagaagaattcccaggaacttccttgtgttgtgtacattcaactcacagagttgaacgttcccttagacagagcagatttgaaacactctttttgtgcaattggcaagtggtgatttcagcagctttgaggtcaatggtagaaaaggaaatatcttcgtataaaaactagacagaatgattctcagaaactcctttgtgatgtgtgcgttcaactcacagagttcaacctttcctttcatagagcagttgggaaacactctgtttgtaaagtctgcaagtggatattcagactttgaggccttcgttggaagcgggatttcttcatattctgctagacagaagaattctcagtaactgccttgtgttgtgtgtattcaactcacagagttgcacgatcctttacacagagcagacttgaaacactctttttgtggaatttgcaagtggagatttcagccgctttgaggtcaatggtagaataggaaatatcttcctatagaaactagacagaatgattctcagaaacttctttgtgatgtgtgcgttcaactcacagagtttaacctttcttttcatagagcagttaggaaacactctgtttgtaaagtctgcaagtggatattcagacctccttgaggccttcgttggaagcgggatttcttcatgttctgctagacagaagaattctcagaaactttcttgtgttgtgtgttttcaactcacagagttgaacgatcctttacacagagcagacttgaaacactccttttgtggaatttgcaagtggagatttcagccgctttgaggtcaatggtagaataggaaatatcttcctatagaaagtagacagaatcattctcagaaactgctgcgtgatgtgtgcgttcaactctcagagtttaacttttcttttcattcagcggtttggaaacactctgtttgtaaagtctgcacgtggatattttgaccacttagacgccttcgttggaaacgggtttttttcatgtaaggctagacagaagaattcccagtaactttccttgtgttgtgtgcattcaactcacagagttgaacgttcccttagacagagcagatttgaaacactctatttgtgcaatttgcaattgtagatttcaagcgttttaaggtcaatggcagaaaaggaaatatcttcgtttcaaaactagacagaatcattctcagaaactgctctgcgatgtgtgcgttcaactctcagagtttaacttttcttttcattcagcagtttggaaacactctgtttgtaaagtctgcacgtggataatttgaccacttagaggtcttcgttggaaacgggtttttttcatgtaaggatagacagaagaattctcagtaacttccttgtgttgtgtgtattcaactcacagagttgaacgatcctttacacagagcagacttgtaacactctttttgtggaatttgcaagtggagatttcagccgctttgaagtcaaaggtagaaaaggaaatatcttcctataaacactagacagaatgattctcagaaactcctttgtgctgtgtgcgttcaactcacagagtttaacctttcttttcatagaacagttagtaaacactctgtttgtaaagtctgcaagtggatattcagacacctttgaggctttcgttggaaacgggatttcttcatattctgctagacagaagaattctcagtaacttccttgtgttgtgtgtattcaactgacagagttgaactttcatttagagagagcagatttgaaacactgtttttgtggaatttgccagtggagatttcaagcgcattggggccaaaggcagaaaaggaaatatcttcgtataaaaactagacagaatcattctcagaaactgctgcgtgatgtgtgcgttcaactctcagagtttaacttttcttttcattcagcggtttggaaacactctgtttgtaaagtctgcacgtggatattttgaccacttagaggccttcgttggaaacgggttttttttcatgtaaggctagacagaagaattcccagtaacttccttgtgttgtgtgcattcaactcacagagttgaacgttcccttagacagagcagatttgaaacactctatttgtgcaatttgcaagtgtagatttcaagtgctttaaggtcaacggcagaaaaggaaatatcttcgtttcaaaactagacagaatcattcccacaaactgcgttgtgatgtgttcgttcaactcacagagtttaacctttcttttcatagagcagttaggaaacagtctgtttgtaaattctgtaagtggatattctgacatcctgtggccttcgttggaaacgggatttcttcatattctgctagacagaagaattctcagtaacttccttgtgttgtgtttattcaactcacagagttgaatggtcctttacacagagcagacttgaaacactctttttgtggaatttgcaagtggagatttcagccgctttgaggtcaatggtagaaaagtaaatatcttcctataaagactagacagaatgattctcagaaactcctttatgatgtgtgcattcaactcacagagtttaacctttcttttcatagagcagttaggaaacactctgcttgtaaagtctgcaagtggatattcagccctctttgaggccttcgttggaaacgggtttttttcatataaggctagacagaagaattcccagtaacttccttgtgttgtgtgtgttcaactcacagagttgaactttcatttacacagagcagatttgaaacactctttttgtggaatttgcaagtggagatttcaagcgctttgaggccaaaggcagaaaaggaaatatcttcgcataaaaactagacagaatcattctcagaaactgctctgcgatgtgtgcgttaaactctcagagtttaacttttctttcattcagcagtttggaaacactctgtttgtaaagtctgcacgtggatattttgaccacttagaggccttcgttggaaacggttttttttcctgtaaggctagacagaagaattcccagtaacttccttgtattgtgtacattcaactcacagagttgaacgttcccttagacagagcagatttgaaacactctttttgtgcaattggcaaatggagatttcaagcgctttaaggtcaatggcagaaaaggaaatatcttcgtttcaaaactagacagaatcattcccacaaactgcgttgtgatgtgttcgttcaactcacagagtttaacctttctgttcatagagcagttaggaaacactctgtttgtaaagtctgcaagtggatattcagacctcctagaggccttcgttggaaacgggatttctccatattctgctagacagaagaattctcagtaacttccttgtgttgtgtgtattcaactcacagagttgaacgatccctttacacagagcagacttgtaacactctttttgtggaatttgcaagtggagatttcagccgctttgaagtcaaaggtagaaaaggaaatatcttcctataaaaactagacagaatgattctcagaaaatcctttgtgatgtgtgcgttcaactcacagagtttaacttttcttttcatagagcagttaggaaacactctgtttgtaaagtctgcaagtggatattcagacctctttgaggccttcgttggaaacgggatttcttcatattctgctagacagaagaattctcagtaacttccttgtgttgtgtgtattcaactgacagagttgaactttcatttagagagagcagattgaaacactgtttttgtggaatttgcaagtggagatttcaagcgctttgtggccaaaggcagaaaacgaaatatcttcgtataaaaactagacagaatcattctcagaaactgctgcgtgatgtgtgcgttcaactctcagagtttaacttttcttttcattcagcggtttggaaacactctgtttgtaaagtctgcacgtggatattttgaccacttagaggccttcgttggaaacgggtttttttcatgtaaggttagacagaagaattctcagtaacttccttgtgtggtgtgtattcaactcacagaggtgtacgatcctttacacaaagcagacttgaaacactctttttgtggaatttgcaagtggagatttcagccgctttgaggtcaatggtagaaaaggaaatatcttcgcataaagaatagacagaatgattctcagaaactcctttgtgatgtgtgcgttcaactcacagagtttaacctttctgttcatagagcagttaggaaacactctgtttgtaaagtctgcaagtggatattcagacctccttgaggccttcggtggaaacgggatttcttcatattatgctagacaaaagaattctcagtaacttccttgtgttgtgtgtattcaactcacagagttgaacgatcctttacacagagcagacttgaaacactgtttttgtggaatttgcaagtggagatttcagccgctttgaggtcaatggtagaataggaaatatcttcctatagaaactagacagaatgattctcagaaactcctttgtgatgtgtgcgttcaactcacagagtttaacctttcttttcatagagcagttaggaaacactctgtttgtacagtctgcaagtggatattcagacatccttgaggcttttgttggaaacgggatttcttcatattctgctagaaagaagaattctcagtaacttccttgtgttgtgtgtattcaactgacagaattgaactttcatttagagagagcagatttgaaacactgtttttgtggaaattgcaagtggagatttcaagcgctttggggccaaaggcagaaaaggaaatatcttcgtataaaaagtagacagaatcattctcagaaactgctgcgtgatgtgtgcgttcaactctcagagtttaacttttcttttcattcagcggtttggaaacactctgtttgtaaagtctgcacgtggatattttgaccacttagaggccttcgttggaaacgggtttttttcatgtaaggctagacagaagaattcccagtaacttccttgtgttgtgtgcattcaactcacagagttgaacgttaccttagacagagcagatttgaaacactctatttgtgcaatttgcaagtgtagatttcaagcgctttaaggtcaatggcagaaaaggaaatatcttcgtttcaaaactagacagaatcattcccacaaactgcgttgtgatgtgttcgttcaactcacagagtttaacctttcttttcatagagcagttaggaaacagtctgtttgtcaattctgtaagtggatattctgacatcttgtggccttcgttggaaacgggatttcttcatattctgctagaaagaagaattctcagtaacttccttgtgttgtgtgtattcaactcacagagttgaacgatcttttacacagagcagacttgaaacactctttttgtggaatttgcaagtggagatttcagcccttttgaggtcaatggtagaaaaggaaatatcttcgtataaagactagacagaatgattctcagaaactcctttgtgatgtgtgcgttcaactcacagagtttaacctttcttttcatagagcagttgggaaacactctgtttgtaaagtctgcaagtggatattcagacatccttgaggctttcgttggaaacaggatttcttcatattctgctagaaagaagaattcccagtaccttccttgtgttgtgtgtgttcaactcacagagttgaactttcatttacacagagcagatttgaaacactctttttgtggaatttgcaagtggagatttcaagcgctttgaggccaaaggcagaaaaggaaatatcttcgtttcaaaactagacagaatcattctcagaaactgcagcgtgatgtgtgtgttcaactctcagagtttaacttttcttttcattcagcggtttggaaacactctgtttgtaaagtctgcacgtggaaattttgaccacttagaggccttcgttggaaacgggtttttttcatgtaaggctagacagaagaattcccagtaacttccttgtgttgtgtgcattcaactcacagagttgaacgttcccttagacagagcagatttgaaacactctatttgtgcaatttgcaagtgtagatttcaagcgctttaaggtcaatggcagaaaaggaaataccttcgtttcaaaactagacagaatcattcccacaaactgcgttgtgatgtgttcgttcatctcacagagtttaacctttcttttcatagagcagttaggaaacattctgtttgtaaattctgtaagtggatattctgacatcttgtggccttcgttggaaacgggatttcttcatattctgctagacagaagaattctcagaatcttccttgtgttgtgtgtattcaactcacacagttgaacgatggtttacacagagcagatttgaaacactctttttgtggaatttgcaagtggagatttcagccgctttgaggtcaatggtagaaaaggaaatatcttcgtataaaaactagagagaatgattctgagaaactcctttgtgatgtgtgcgttcaactcacacactttaacctttcttttcatagagcaattaggaaacactctgtttgtaaagtctgcaagtggatattcagacctccttgaggccttctttggaaacgggatttcttcatattctgctagacagaaaaattctcagaatcttccttgtgttgtgtgtattcaactcacagagttgaacgatcctttacacagagcagatttgaaacactctttttgtggaatttgcaagtggagatttcaagcgctttgaggctaaaggcagaaaaggaaaatatcttcgtataacaactagacagaatcattctcagaaactgctgcgtgatgtgtgcgttcaactctcagagtttaacttttcttttcattcagcggtttggaaacactctgtttgtaaagtctgcacatggatattttgcccacttagaggccttcgttggaaacgggtttttttcatgtaaggctagacagaagaattcccagtaacttccttgtgttgtgtgcattcaactcacagagttgaacgttcccttagacagagcagatttgaaacactctatttgtgcaatttgcaagtgtagttttcaagctctttaaggtcaacggcagaaaaggaaatatcttggtttcaaaactagacagaatcattcccacaaactgcgttgtgatgtattcgttcaactcacagagtttaacctttctgttcatagagcagttaggaaacactctgtttgtaaagtctgtaagtggatattctgacatcttgtggcccttcgttggaaacgggatttcttcatattctgctagacagaagaattctcagtaacttccttgtgttgtgtgtattcaactcacagagttgaacgatcctttacacagagcagacttgaaacactctttttgtggaatttgcaagtggagatttcagccgctttgaggtcaatggtagaataggaaatatcttcctatagaaactagacaaacgattctcagaaactcctttgtgatgtgtgcgttcaactcacagagtttaacctttctgttcatagagcagttaggaaacactctatttgtaaagtctgcaagtggatattcagacctctttgaggccttcgttggaaacgggatttcttcatattctgctagacagaagaattcccagtaacttccttgtgttgtgtgtgttcaactcacagagttgaactttcatttacaaagagcatatttgaaacactctttttgtggaatttgcaagtggagatttcaagcgctttgaggccaaaggcagaaaaggaaatatcttcgtataaaaactagacagaatcattctcagaaactgctctgcgatgtgtgcgttcaactctcagagtttaacttttcttttcattcagcagtttggaaacactctgtttgtaaagtctgcacgtggatattttgaccacttacaggccttcgttggaaacgggtttttttcctgtaaggctagacagaagaattcccagtaacttccttgtgttgtgtgctttcaactcacagagttgaacgttcccttagacagagcagatttgaaacactctatttgtgcaatttgcaagtgtagatttcaagcgctttaaggtcaatggcagaaaaggaaatatcttcgtttcaaaactagacagaatcattcccacaaacagcgttgtgatgtgttcgttcaactcacagagtttaacctttcttttcatagagcagttaggaaagagtctgtttgtcaattctgtaagtggatattctgacatcttgtggcattcgttggaaacgggatttcttcatattctgctagacagaagaattctcagtaacttccttgtgttgtgtgtattcaactcacagagttgaacgatcctttacacagagcagacttgaaacattctttttgtggaatttgcaagtggagatttcagccgctttgtggtcaatggtagaataggaaatatcttcctatagaaactagacagaatgattctcagaaacttctttgtgatgtgtgcgttcaactcacagagtttaacctttcttttcatagagcagttaggaaacactctgtttgtaaactctgcaagtggacattcagacctctttgaggccttcgttggaaacgggatttcttcatactgtgctagacagaagaattctcagaatcttccttgtgttgtgtgtattcaactcacacagttgaacgatcctttacacagagcagacttggaacactctttttgtggaatttgcaagtggagatttcagccgctttgaagtcaaatgtagaaaaggaaatatcttcctataaaaactagacagaatcattctcagaaaatcctctgtgatgtgtgcgttcaactctcagagtttaacttttcttttcattcagcagttcagaaacactctgtttgtaaagtctgcacgtggatattttgaccacttagaggccttcgttggaaacgggtttttttcatataagggtagacaggagaattcccagtaacttccttgtgttgtgtgcattcaactcacagagttgaacgttcccttagacagagcagatttgaaacactctatttgtgcaatttgcaagtgtagatttcaagcgctttaaggtcaacggcagaaaaggaaatatcttcgtttcaaaactagacagaatcattcccacaaactgcgttgtgatgtgttcgttcaactcacagagtttaacctttctgttcatagagcagttaggaaacactctgtttgtaaagtctgtaagtggatattcagacatcttgtggccttcgttggaaacgggatttcttcatattctgctagacagaagaattgtcagaaacttccttgtgttgtgtgtcttcaactcacagagttaaacgatgctttacacagagtagacttgaaacactctttttctggaatttgcaagtggagatttcagccgctttgaggtcaatggtagaaaaggaaatatcttcgtataaaaactagacagaatgattctcagaaactcctttgtgatgtgtgcgttcaactcacagagtttaacttttcttctcatagagcagttaggaaacactctgtttgtaaagtctgcaagtggatattcagacctctttgaggtcttcgttggaaacgggatttcttcatattatgctagacagaagaattctcagtaacttccttgtgttgtgtgtattcaactgacagagttgaactttcatttagacagagcagatttgaaacactctttttccggaatttgcaagtggagatttcaagcgctttgaggccaaaggcagaaaaggaaatatcttcgtataaaaactagacagaatcattctcagaaactgctctgtgatgtgtgcgttcaactctcagagtttaacttttcttttcattcagcagtttggaaacactctgtttgtaaagtctgcacgtggatattttgaccacttagaggccttcgttggaaacgggtttttttcatgtaaggctagacagaagaattcccagtaatttccttgtattgtgtgcattcaactcacagagttgaacgttcccttagacagagcagatttgaaacactctatttgtgcaatttgcaagtgtagatttcaagcgctttaaggtcaatggcagaaaaggaaatatcttcgtttcaaaactagacagaatcattcccacaaactgcgttgtgatgtgtgcgttcaactcacagagtttaacctttcttttcatagagcagttaggaaacagtctgtttgtcaattctgtaagtggatattctgacatcttgtggccttcgttggaaacgggatttcttcatattctcctagacagaagaattctcagtaacttccttgtgttgtgtgtattcaactcacagagttgaacgatcctttacacagagcagacttgaaacactctttttctggaatttgcaagtggagatttcagccgctttgaggtcaatggtagaataggaaatatctttctatagaaactagacagaatgattctgagaaactcctttgtgatgtgtgcgtacaactcacagagtttaacctttcttttcatagagcagttgggaaacactccgtttgtaaactctgcaagtggatattcagacctccttgaggccttcgttggaaacgggatttcttcatattatgctagacagaagaattctcagtaacttccttgtgttgtgtgtattcaactgacagcagttgaactttcatttagagagagcagatttgaaacactgtttttgtggaatttgcaattggagatttcaagcgctttggggccaaaggcagaaaaggaaatatcttcgtataaaaactacacagaatcattctccgaaactgctctgcgatgtgtgcgttcaactctcagagtttaacttctcttttcattcagcagtttggaaacactctgtttgtaaagtctgcacgtggataacttgaccacttagaggccttcgttggaaacgggtttttttcatgtaaggctagacagaagaattctcagtaacttccttctgttgtgtgtattcatctcacagagttgaacgatcctttacacagagcagacttgtaacactctttttgtgcaattggcaaatggagatgtcaagcgctttaaggtcaattgcagaaaagaaaatatcttcgtttcaaaactagacagaatgattctcagaaacttctttgtgatgtgtgcgttcaactcacagagtttaaccttatttttcatagagcagttaggaaacactctgtttgtaaactctgcaagtggatattcagacctctttggggccttcgttggaaacgggatttcttcatactatgctagacagaagaattctcagtaacttccttgtgttgtgtgtattcaactcacagagttgaacgatcctttacacagagcagacttgaaacactctttttgtggaatttgcaagtggagatttcaagcgctttgaggccaaaggcagaaaaggaaatatcttcgtataaaaactagacagaatgattctcagaaacttctttgtgatgtgtgtgttcaactcacagagtttaacctttcttttcatagagcagttaggaaacactgtgtttttaaactctgcaagtggatattcagacctctttgaggcctttccttggaaacgggtttcttcatactgtgctagacagaagaattctcagtaacttccttgtgttgtgtgtattcaactgacagagttgaactttcatttagagagagcagatttgaaacactgtttttgtggaatttgcaagtggagatttcaagcgctttggggccaaaggcagaaaaggaaatatcttcgtataaaaattagacagaatcattctcagaaactgctgcgtgatgtgtgcgttcaactctcagagtttaacttttcttttcattcagcggtttggaaacactctgtttgtaaagtctgcacgtggatattttgcccacttagaggccttcgttggaaacgggtttttttcatgtaaggctagacagaagaattcccagtaacttccttgtgttgtgtacattcaactcacagagttgaacgttcccttagacagagcagatttgaaacactctttttgtgcaattggcaaatggagatttcaagcgctttaaggtcaatggcagaaaagggaatatcttcgtttcaaaactagacagaatcattcccacaaactgcgttgtgatgtgttcgttcaactcacagagtttaacctttctgttcatagagcagttaggaaacactctgtttgtaaagtctgtaagtggatatcctgacatcttgtggccttcgttggaaaagggatttcttcatattctgctagacagaagaattctcagaaacttcctggtgttgcgtgttttcaactcacagagttctacgatcctttacacagagtagacttgaaaaactctttttgttgaattggccagtggagatttcagccgctttgaggtcaatggtagaaaaggaaatatcttcgtataaaaactagacagaatgattctcagaaactcctttgtgatgtgtgcgttcaactcacagagtttaacctttcttttcatagagcagttaggaaacactctgtttgtaaagtctgcaagtggatattcagacatctttgaggctttcgttggaaacgggatttcatcatattctgctagacagaagaattcccagtaacttccttgtgttgtgtgtgttcaactcacagagttgaactttcatttacacagagcagatttgaaacactctttttgtggaatttgcaagtggagatttcaagcgctttgaggccaaagcagaaaaggaaatatcttcgtttcaaaactagacagaatcattctcagaaactgctgcgtgatgtgtgcgttcaactctcagagtttaacttttcttttcattcagcggtttggaaacactctgtttgtaaagactgcacgtggatattttgaccccttagaggtcttcgttggaaacgggtttttttcatgtaaggctagacagaagaattcccagtaacttccttgtgttgtgtgcattcaactcacagagttgaacgttcccttagacagagcagatttgaaacactctatttgtgcaatttgcaagtgtagttttcaagctctttaaggtcaacggcagaaaaggaaatatcttcgtttcaaaactagacagaatcattcccacaaactgcgttgtgatgtgttcgttcaactcacagagtttaacctttgttttcatagaggagttaggaaacagtctgtttgtaaattctgtaagtggatattctgacatcttgtggccttcgttggaaacgggatttcttcatattctgctagacagaagaattctcagttacttccttgtgttgtgtgtattcaactcaaagagttcaacgatcctttctacagggcagacttgaaacactctttttgtggaatttgcaagtggagatctcagccgctttgtggtcaatagtagaaaaggaaatatcttcgtataaaaactagacagaatgattctcagaaactcccttgtgatgtgtgcgttcaactcacagagtttaacctttcttttcatagagcagttaggaaacactctgtttgtaaagtctgcaagtggatattcagacttctttgaggccttcgttggaaacgggatttcttcatattctgctagacagaagaattctcagtaacttccttgtgttgtgtgtattcaactgacagagttgaactttcatttagagacagcagatttgaaacactgtttttgtggaagttgcaagtggagatttcaagcgctttggggccaaaggcagaaaaggaaatatcttcgtataaaaactagacagaatcattctcagaaaatgctctgtgatgtgtgcgttcaactctcagagtttaacttttcttttcattcagcagtttggaaacactctgtttgtaaagtctgcacgtggatattttgaccacttagaggccttcgttggaaacgggtttttttcatgtaagggtagaaagaagaattcccagtaacttccttgtgttgtgtgcattcaactcacagagttgaacgttcctttagacagagcagatttgaaacactctatttgtgcaatttgcaagtgtagttttcaagctctttaaggtcaacggcagaaaaggaaatatcttggtttcaaaactagacagaatcattcccacaaactgcgttgtgatgtgttcgttcaactcacagagtttaacctttcttttcatagaccagttaggaaacagtctgtgtgtaaattctgtaagtggatattctgacatcttgtggccttcgttggaaacgggatttcttcatattctgctagacagaagaattctcagaatcttccttgtgttctgtgtattcaactcacagagttgaacgatcctttacacagagcagacttgaaacactctttttgtggaatttgcaagtggagatttcagccgctttgaggtccatggtagaaaaggaaatatcttcgtataaaaactagacagaatgattctcagaaacttcattgtgatgtgtgcgttcaactcacagagtttaacctttcttttcatagagcagttaggaagcactctgtttgtcaactctgcaagtggatattcagacctctttgaggccttcgttggaaacgggatttcttcatactgtgctagacagaagaaatctcactaacttccttgtgttgtgtgtattcaactcacagagttgaacgatcctttacacagagcggacttgaaacactcattttgtggaatttgcaagtggagatttcagccgcgttgaggtcaatggtagaaaaggaaatatcttcgtataaaaactagacagaatcattctcagaaactgctgcgtgatgtgtgcgttcaactctcagagtttaacttttcttttcattcagcggtttggaaacactctgtttgtaaagtctgcacgtggatattttgaccacttagaggccttcgttggaaacgggtttttttcatgtaaggctagacagaagaattcccagtaacttccttgtgttgcgtgcattcaactcacagagttgaacgttcccttagacagagcagatttgaaacactctatttgtgcaatttgcaagtgtagatttcaagcgctttaaggtcaacggcagaaaaggaaatatcttcgtttcaaaactagacagaatcattcccacaaactgcgttgtgatgtgttcgttcaactcacagagtttaacctttcttttcatagtgcagttaggaaacagtctgtttgtaaattctgtaagtggatattctgacatcttgtggccttcgttggaaacgggatttcttcatattctgctagacagaagagttctcagtaacttccttgtgttgtgtgtattcaactcacagagttgaacgatcctttacacagagcagacttgtaacactctttttgtggaatttgcaagtggagatttcagccgctttgaagtcaaaggtagaaaaggaaatatcttcctataaaaactagacagaatgattctcagaaactcctttgtgatgtgtgcgttcaactcacagagtttaacctttcttttcatagagcagttaggaaacactctgtttgtaaagtctgcaagtggatattcagacctctttgaggcctccgttggaaacgggtttttttcatataaggctagacagaagaattccccagtaacttcccttgtgttgtgtgtgttcaactcacagagttgaactttcatttacacagagcagatttgaaacactctttttgtggaatttgcaggtggagatttcaagcgctttgaggccaaaggcagaaaaggaaatatcttcgtataaaaactagacagaatcattctcagaaactgctctgcgatgtgtgcgttcaactctcagagtttaacttttcttttcattcaacagtttgaaaacactctctttgtaaagtctgcacgtggatattttgaccacttagaggccttcgttggaaacgggtttttttcttgtaaggctagacagaagaattcccagtaacttccttgtgttgtgtgcattcaactcacagagttgaaccttcccttagacagagcagatttgaaacactctatttgtgcaatttgcaagtgtagatttcaagcgctttaaggtcaatggcagaaaaggaaatatcttagtttcaaaactagacagaatgattctcagaaactcttttgtgatgtgtgcgttcaactcacagagtttaacctttctgttcatagagctggtaggaaacactctgtttgtaaagtttgcaagtggatattcagacctccttgaggccttcgttggaaacgggatttcttcatattctgctagacagaagaattctcagtaacttccttgtgttgtgtgttttcaactcacagagttgaacgatcctttacacagagcagacttgaaacactctttttgtggaatttgcaagtggagatttcagccgctttgaggtcaatggtagaataggaaatatcttcctgtagaaactagacagaatgattctcagaaactcctttgagatgtgtgcgttcaactcacagagtttaacctttcttttcatagagcagttaggaaacactctgtttgtaaagtctccaagtggatattcagacctctttgaggccttcgttggaaacgggtttttttcatataaggctagacagaagaattctcagtaacttccttctgttgtatgtattcaactgacagagttgaactttcatttagagagagcagatttgaaacactgtttttgtggaatttgcaagtggagatttcaagcgcttcggggccaaaggcagaaaaggaaatatcttcgtataaaaactagacagaatcattctcagaaactgctgcgtgatgtgtgggattacctctcagagttttacttttcttttcattcagcggtttggaaacactctgtttgtaaagtctgcacgtggatattttgaccacttagaggccttcgttggaaacgggtttttttcatgtaaggctaaacagaagaattcccagtaacttccttgtgttgtgtacattcacctcacagagttgaacgttcccttagacagagcagatttgaaacactctttttgtgcaattggcaaatggagatttcaagcgctttaaggtcaatggcagaaaaggaaatatcttcgtttcaaaactagacagaatcattcccacaaactgcgttgtgatgtgttcgttcaactcacagagtttaacctttcttttcatagagcagttaggaaacagtctgtttgtcaattctgtaagtggatattctgacatcttgtggccttcgttggaaacgggatttcctcatattctgctagacagaagaattcccagtaacttccttgtgttgtgtacattcaactcacagagttgaacgttcccttagacagagcagacttgtaacactctttttgtggaatttgcaagtggagatttcagccgctttgaagtcaaatgtagaaaaggaaatatcttcctataaaaactagacagaatgattctcagaaactcctttgtgatgtgtgtgttcaactcacagagtttaacgtttcttttcatagagcagttagtaaacactcagtttataaagtctgcaagtggatattcagacccctttgaggccttcgttggaaacgggatttcttcatattatgctacacagaagaattcccagtaacttccttgtgatgtgtgtgttcaactcacagagttgaactttcatttacacagagcagattggaaacactctttttgtggaatttgcaagtggagatttcaagcgctttgaggccaaaggcagaaaaggatatatcttcgtataaaaactacacagaatcattctcagaaactgctctgcgatgtgtgcgtacaactctcagagcttaacttttcttttcattcagcagtttggaaacactctgtttgtaaagtctgcacgtggataatttgaccacttagagaccttcgttggaaacgggtttttttcatgtaaggctagacagaagaattcccagtaacttccttgtgttgtgtacattcaactcacagagttgaaggttcccttagacagagcagatttgaaacactctttttgtgcaattggcaagtggagatttcaagcgctttaaggtcaatggcagaaaaggaaatatcttcgtttcaaaactagacagaataattctcagaaactcctttgtgatgtgtgcgttcaactcacagagtttaacctttcttttcatagagcagttcggaaacactctgtttgtaaagtctgcaagtggatattcagacctccctgaggccttctttggaaacgggatttcttcatattatgctagacagaagaattctcagtaacttccttgtgttgtgtgtattcaactcacagagttgaacaatcctttacacagagcagacttgaaacactctttttgtggaatttgcaagtggagatttcagccgctttgaggtcaatgttagaataggaaatatcttcctatagaaactagacagaacgattctcagaaactcctttgtgatgtgtgcgttcaactcacagagtttaacctttcttttcatagagcagttaggaaacactctgtttgtaacgtctgcaagtggatattcagacctccttgaggccttcgttggaaacgggatttcttcatattctgctagacagaagaattcccagtaacttccttgtgttgtgtgtgttcaactcacagagttgaactttcatttacacagagcagatttgaaacactctttttgtggaatttgcaaatggagatttcaagcgctttgaggccaaaggcaggaaaggaaatatcttcgtataaaaactagacagaatcattctcagaaactgctctgcgatgtgtgcgttcaactctcagagtttaactttgcttttcattcagcagtttggaaacactctgtttgtaaagtctgcacctggataatttgaccacttagaggccttcgttggaaacgggtttttttcatgtaaggctagacagaagaattcccagtaacttccttgttttgcgtgtgttcaactcacagagttgaactttcatttacacagagcagatttgaaacactctttttgtggaatttgcaagtggagatttcaagcgctttgagggcaaaggcagaaaaggaaatatcttcgtttcaaaactagacagaatcattcccacaaactgcgttgtgatgtgttcgttcaactcacagagtttaacctttcttttcatagagcagttaggaaacactctgttggtaaattctgtaagtggatattctgacatcttgtggccttcgttggaaacgggatttcttcatcttctgctagacagaacaattctcagtaacttccttgtgttgtgtgtattcaactcacagagttgaatgatcctttacacagaacagtcttgaaacactctttttgtggaatttgcaagtggagatttcagccgctttgaggtccatggtagaataggaaatatcttcctatagaaactagacagaatgattctcagaaactcctttgtgatgtgtgcgttcaactcagagagtttaacttttcttttcatagagcagttaggaaacactctgtttgtaaagtctgcaagtggatattccgacctctttgaggccttcgttggaaacgggatttcttcatattatgctagacagaagaattcccagtaacttccttgtgttgtgtgtgttcaactcacagagttgaactctcatttacacagagcagatttgaaacactctttttgtggaatttgcaagtggagatttcaagcgctttgaggtcaaaggcagaaaaggaaatatcttcgtataaaaactagacagaatcattctcagcaactgctgcgtgatgtgtgcgttcaactctcagagtttaccttttcttttcattcagcggtttggaaacactatgtttgtaaagtctgcacgtggatattttgaccacttagaggccttcgttggaaacgggattttttcatgtaaggctagacagaagaattcccagtaacttccttgcgttgtgtacattcaactcacagagttgaacgttcccttagacagagcagatttgaaacactctttttgtgcaattggcaagtggagatttcaagcgctttaaggtcaatggcagaaaaggaaatatcttcgtttcaaaactagacagaatcattcccacaaactgcgttgtgatgtgttcgttcaactcacagagtttaacctttcttttcatagagcagttaggaaccagtctgtttgtaaattctgtaagtggatattctgacatcttgtgaccttcgttggaaacgggatttcttcatattctgctagacagaagaattctcagtaacttccttgtgttgtgtgtattgaactcacagagttgaacgatcctttacacagagcagacttgaaacattctttttgtggaatttgcaagtggagatttcagccgctttgaggtcaatggtagaataggaaatatctttctatagaaactagacagaatgattctgagaaactcctttgtgatgtgtgcgttcaactcacagagtttaacctttcttttcatagagcagttaggaaacactctgtttgtaaagtctgcaagtggatattcagacctctttgaggccttcgttggaaacgggatttcttcatattctgctagacagaagaattctcagtaacttccttgtgttgtgtgtattcaactgacagagttgaactttcatttagagagagcagatttgaaacactgtttttgtggaatttgcaagtgtatatttcaagcgctttggggccaaaggcagaaaaggaaatatcttcgtataaaaactagacagaatcattctcagaaactgctctgcgatgtgtgcgttcaactctcagagtttaacttttcttttcattcagcagtttggaaacactctgtttgtaaagtctgcacctggataacttgaccacttagaggcctccgttggaaacgggtttttttcctgtaaggctagacagaagaattcccagtaacttccttgtgttgtgtacattcaactcacagagttgaacgttcccttatacagagcagatttgaaaaactctttttatgcaattggcaagtggtgatttcagccgctttgaggtcaatggtagaaaaggaaataacttcgtataaaaattagacagaatcattcccaaaaactgcgttgtgatgtgttcgttcatctcacagagtttaacctttcttttcatagagcagttaggaaacagtctgtttgtaaattctgtaagtggatattctgacatcttgtggccttcgttggaaacgggatttcttcatattctgctagacagaagaattctcaggaacttccttgtgttgtgtgaattcaactcacagagttcaacgatcctttacacagagcagacttgaaacactctttttgtggaatttgcaagtggagatttcagccgcttttaggtcaatggtagaataggaaatatcttcctatagaaactagacagatgattctcagaaactcctttgtgatgtgtgcgttcaactcacagagtttaacctttcttttcttagagcagttaggaaacactctgtttataatgtctgcaagtggatattcagacccctttgaggccttcgttggaaacgggatttcttcatattatgctagacagaagaattctcagtaacttccttgtgttgtgtgtattcaactgacagagttgaactttcatttagagagagcagatttgaaacactgttgttgtggaatttgcaagtggagatttcaagcgctttgggaccaaaggcagaaaaggaaatatcttcgtataaaaactagacagaatcattctcagaaactgctgcgtgatgtttgcgttcaactctcagagtttaacttttcttttcattcagcggtttggaaacactctgtttgtaaagtctgcacgtggaaattttgaccacttagaggccttcgttggaaaagggtttttttcatgtaaggctagacagaagaattcccagtaacttccttgtgttgtgtacattcaactcacagagttgaacgttcccttagacagagcagatttgaaacactctttttgtgcaattggcaaatggagatttcaagcgctttaagttcaatggcagaaaaggaaatatcttcgtttcaaaactagacagaatcattcccacaaactgcgttgtgatgtgttcgttcaactcacagagtttaaactttctgttcatagagcagttaggaaacactctgtttgtaaagtctgtaagtggatattccgacatcttttggccttcgttggaaacgggatttcttcatattctactagacagaagaattctcagtaactcctttgtgttgtgtgtattcaactcacagagttgaacgatcctttacacagagcagacttgaaacactctttttgtggaatttgcaagtggagatttcagccgctttgaggtcaatggtagaataggaaatatcttcctatagaaactagacagaatgattctcagaaacttctttgtgatgtgtgcgctcaactcacagagtttaacctttcttttcatagagcagttaggaaacactctgtttgtaaactctgcaagtggatattcagacctctttgaggccttcgttggaaacgggatttcttcatattatgcctgagagaagaattctcagtaacttccttgtgttgtgtgtattcaactcacagagttgaacgatcctttacacagagcagacttggaacactctttttgtggaatttgcaagtggagatttcagccgcgttgagatcaatggtagaaaaggaaatatcttcgtataaaaactagacagaatgattctcagaaactcctttgagatgtgtgtgttcaactcacagagtttaacctttcttttcatagagcagttaggaatcactctgtttgtaaagtctgcaagtggatattcagacctctttgaggccttcgttggaaacgggtttttttcatataaggctagacagaagaattctcagtaacttccttgtgttgtgtgtattcaactgacagagttgaactttcatttagagagagcagatttgaaacactgtttttgtggaatttgcaagtggagatttcaagcgctttgtggccaaaggcagaaaacgaaatatcttcgtataaaaactagacagaatcattctcagaaactgctgcgtgatgtgtgcgttcaactctcagagtttaacttttcttttcattcagcggtttggaaacactctgtttgtaaagtctgcacgtggacattttgaccacttagaggccttagttggaaacgggtttttttcatgtaaggctagacagaagaattcccagtaacttccttgtgttgtgtacattcaactcacagagttgaacgttcccttagacagagcagatttgaaacactctttttgtgcaattggcaagtggagatttcaagcgctttgaggtcaatggcagaaaaggaaatatcttcgtttcaaaactagacagattcattcccacaaactgcgttgtgatgtgttcgttcaactcacagagtttaacctttctgttcatagagcagttaggaaacactctgtttgtaaagtctgccagtggatattcagacctccttgaggccttcgttggaaacgggatttcttcatattctgctagacagaagaattctcagtaacttccttgtgttgtgtgtattcaactcacagagttgaacgatcctttacagagagcagacttgaaacactctttttgtggaaattgcaagtggagatttcagctgctttgaggtcaatggtagaataggaaatatcttcctatagaaactagacagaatgattctcagaaactcctttgtgatgtgtgcgttcaactcacagagtttaacctttcttttcatagagcagttaggaaacactctgtttgtaaagtctgcaagtggatattcagacctccttgagggttcgttggaaacgggatttcttcatattatgctagacagaagaattcccagtaacttccttgtgttgtgtgtgttcaactcacagagttgaactttcatttacacagagcagatttgaaacactctttttgtggaatatgcaagtggagatttcaagcgctttgaggccaaaggcagaaaaggaaatatcttcgtttgaaaactagacagatatcattctcagaaactgctgcgtgatgtgtgcgttcaactctcagagtttaacttttcttttcattcagcggtttggaaacactctgtttgtaaagtctgcacgtggatattttgaccacttagaggccttcgttggatacgggttttttttcatgtaaggctagacagaagaattcccagtaacttccttgtgttgtgtgcattcaactcacagagttgaacgttcccttagacagagcagatttgaaacactctatttgtgcaatttgcaagtgtagatttcaagcgctttaaggtcaacggcagaaaaggaaatatcttcgtttcaaaactagacagaatcatacccacaaactgcgttgtgatgtgttcgttcaactcacagagtttaacctttctgttcatagagcagttaggaaacactctgtttgtaaagtctgtaagtggatattctgacatcttgtggccttcgttggaaacgggatttcttcatattctgctagacagaagaattctcagaatcttccttgtgttgtgtgtattcaactcacagagttgaacgatcctttacacagagcagacttgaaacactctttttgtggaatttgcaagtggagatttcagccgctttgaggtccatggtagaaaaggaaatatcttcggtataaaaactagacagaatgattctcagaaactcctttgagatgtgtgtgttcaactcacagagtttaacctttcttttcatagagcagttaggaatcactctgtttgtaaagtctgcaagtggatattcagacctctttgaggccttcgttggaaacgggtttttttcatataaggctagagagaagaattcccagtaacttccttgtgttgtgtgtgttcaacccacagagttgaacttccatttacacagagcagatttgaaacactctttttgtggaatttgcaagtggagatttcaagcgctttgaggccaaaggcagaaaaggaaatatcttcgtttcaaaactagacagaatcattctcagaaactgctctgcgatgtgtgcgttcaactctcagagtttaacttttcttttcattcagcagtttggaaacactctgtttgtaaagtctgcacgtggataatttgaccacttagaggccttctttggaaacgggtttttttcatataaggctagacagaagaattcccagtaacttccttgtgttgtgtacattcaactcacagagttgaacgttcccttagacagagcagatttgaaacactctttttgtgcaattagcaagtggagatttcaagcgctttaaggtcaatggcagaaaaggaaatatcttactttcaaaactagacagaatgattctcagaaacttctttgtgatgtgtgcgttcaactcacagagtttaacctttcttttcatagagcagttaggaaacactctgtttataaactctgcaagtggatattcagacctctttgaggccttcgttggaaacgggatttcttcatactgtgctagacagaagaattctcagtaacttccttgtgttgcgtgtattcaactcacagagttgaacgatcctttacacagagcgggcttgaaacactctttttgtggaatttgcaagtggagatttcagccgcgttgaggtcaatggtagaaaaggaaatatcttcgtataaaaactagacagaatgattctcataaactcctttgtgatgtgtgaattcaactcacagagtttcacctttcttttcatagagcagttaggaaacactctgtttgtaaagtctgcaagtggatattcagacctccttgaggccttcgttggaaacgggatttcttcatattctgctagacagaagcaattcccactaacttccttgtgttgtgtgtgttcaactcacaggagttgaactttcatttacacagagcagatttgaaacactctttttgtggaatttgaaagtggagatttcaagcgctttgaggccaaaggcagaaaaggaaatatcttcgtttcaaaactagacagaatcattctctgaaactgctgcgtgatgtgtgcgttcaactctcaaagtttaacttttcttttcattcagctgtttggaaacactctgtttgtaaagtctgtacgtggaaattttgaccacttagaggccttcgttggaaacgggtttttttcatgtaaggctagacagaagaattcccagtaacttccttgtgttgtgtacattcaactcacagagttgaacgttcccttagacagagcagatttgaaacactctttttgtgcaattggcaagtggagatttcaagcgctttaaggtcaatggcagaaaaggaaatatcttcgtttcaaaactacacagaatgattctcagaaactcctttgtgatgtgtgcattcaactcacagagtttaacctttcttttcatagagcagttaggaaacactctgtttgtaaagtctgcaagtggatattcagacatctttgaggctttcgttggaaacgggatttcttcatattctgctagaaagaagaattctcagtaacttccttgtgttgtgtgtattcaactcacagacttgaatgatcctttacacagaacagtcttgaaagactctttttgtggaatttgcaagtggagatttcagccgctttgaggtcaatggtagaataggaaatatcttccaatagaaactagacagaatgactctcagaaactcctttgtgatgtgtgtgttcaactcacagagtttaacctttcttttcatagagcagttagtaaacactctgtttataaagtctgcaagtggatattcagacccctttgaggccttcgttggaaacgggatttcttcatattctgctagacagaagaattcccagtaacttccttgtgttgtgtgtgttcaactcacagagttgaactttcatttacacagagcagatttgaaacagtctttttgtggaatttgcaagtggagatttcaagcgctttgaggccaaaggcagaaaaggaaatatcttcgtataaaaactagacagaatcattctcagaaactgctgcgtgatgtgtgcgttcaactctcagagtttaacttttcttttcattcagcggtttggaaacactctgtttgtaaagtctgcacgtggatattttgaccactcagaggccttcgttggaaacgggtttttttcatgtaaggctagacagaagaattcccagtaacttccttgtgttgtgtacattcaactcacagagttgaacgttcccttagacagaacagatttgaaacactctttttgtgcaattggcaagtggtgatttcagccgctttggggtcaatggtagaaaaggaaatatcttcgtataaaaactagacagaatgattctcagaaactcctttgtgatgtgtgcgttcaactcacagagtttaacctttcttttcatagagcagttaggaaacactctgtttgtaaagtctgcaagtggatattcagacctctttgaggccttctttggaaacggcatttcttcatattatgctagacagaagaattctcagtaacttccttgtgttgtgtgtatgcaactcacagagttgaacgatcctttacacagagcagacttgaaacactctttttgtggaatttgcaagtggagatttcagccgctttgaggtcaatggtagaataggaaatatcttcctatagaaactagacagaatgattctcataaactcctttgtgatgtgtgcgttcaactcacagagtttaacctttcttttcatagagcagttaggaaacactctgtttgtaaagtctgcaagtggatattcagacctccttgagaccttcgttggaaacgggatttcttcatattatgctagacagaggaattctcagtaacttccttgtgttgtgtgtattcaactgacagagttgaactttcatttagagagagcagatttgaaacactgtttttgtggaatttgcaagtggagatttcaagcgctttggggccaaaggcagaaaaggaaatatcttcgtataaaaactagacagaatgattctcagaaactgctctgcgatgtgtgcgttcaactctcagagtttaacttttcttttcattcagcagtttggaaacactctgtttgtaaagtctgcacgtggatattttgaccacttggaggccttcgttggaaacgggtttttttcctgtaaggctagacagaataattcccagtaacttccttgtgttgagtacattcaactcacagagttgaacgttcccttagacagagcagatttgaaacactctttttgtgcaattgacaagtggagatttcaagcgctttaaggtcactggcagaaaaggaaatatcttcgtttcaaaagtagacagaatgattcccacaaactgcgttgtgatgtgttcgttcaactcacagagtttaacctttcttttcatagagcagttaggaaacactctgtttgtaaattctgtaagtggatattctgaaatcttgtggccttcgttggaaacgggatttcttcatattctgctagacagaagaattcccagtaacttccttgtgttgtgtacattcaactcacagagttgaacgttcccttagacagagcagacttgtaacactctttttgtgcaatttgcaagtggagatttcagccgctttgaagtcaaaggtagaaaaggaaatatcttcctataaaaactagacagaatgattctcataaactcatttgtgatgtgtgcattcaactcacagagtttcacctttcttttcatagagcagttaggaaacactctgtttgtaaagtctgcaagtggatattcagacctccttgaggccttcgttggaaacgggatttcttcatattctgctagacagaagaattctcagtaacttccttgtgttgtgtgtattcaactgacagagttgaactttcatttagagagagcagatttgaaacactgtttttttggaatttgcaagtggagatttcaagcgcttttgggccaaaggcagaaaaggaaatatcttcgtataaaaactagacagaatgattctcagaaactcctttgtgatgtgtgcattcaactcacagagtttaaccattcctttcatagagcagttaggaaacactctgtttgtaaagtctgcaagtggatattcagacctctttgaggccttcgttggaaacgggatttcttcatattctgctagacagaagaattctcagtaacttccttgtgttgtgtgtattcaactcacagagttgaacgatcctttacacagagcagacttgaaacactctttttgtggaatttgaaagtggagatttcagccgctttgaggtcaatggtagaaaaggaaatatcttcgtataaaaactagacagaatgattctcagaaactcctttgtgatgtgtgcgttcaactcacagagtttaacctttcttttcatagagcagttaggaaacactctgtttgtaaagtctgcaagtggatattcagacctccttgaggctttcgttggaaacgggatttcttcatattctgctatacagaagaattctcagaaacttccttgtgttgtgtgttttcaactcacagagttgaacgatgctttacacagagtagacttgaaacactcttgttgtggaatttgcaagtggagatttcagccgctttgaggtcaatggtagaataggaaatatcttcctatagaaactagacagaatgattctcagaaactcctttgtgatgtgtgtgttcaactcacagagtttaacctttcttttcatagagcagttagtaaacactctgtttataaagtctgaaagtggatattcagacccctttgaggccttcgttggaaaagggatttcttcatattatgctagacagaagaattcccagtaacttccttgtgttgtgtgtgttcaactcacagagttgaactttcatttacacagagcagatttgaaacactctttttgtggaatttgcaagaggagatttcaagcgctttgaggccaaaggcagaaaaggaaatatcttcgtataaaaactagacagaatcattctcagaaactgctctgcgatgtgtgcgttcaactctcagagtttaacttttcttttcattcagaagtttggaaacactctgtttgtaaagtctgcacgtggataacttgaccacttagaggccttcgttggaaacggttttttttcatgtaaggctagacagaagaattcccagtaacttccttgtgttgtgtacattcaacacacagagttgaacgtttccttagagagagcagatttgaaacactctttttgtgcaattggcaagtggtgatttcagccgctttgaggtcaatggtagaaaaggaaatatcttcgtataaaaactagacagaatcattcccacaaactgcgttgtgatgtgttcgttcatctcacagagtttaacctttcttttcgtagagcagttaggaaacagtctgtttgtaaattctgtaagtggatattctgacatcttgtggccttcgttggaaacgggatttcttcatattctgctagacagaggaattctcagaatcttccttgtgttgtgtgtattcaactcacagagttgaacgatcctttacacagagcagacttgaaacactctttttgtggaatttgcaagtggagatttcagccgctttgaggtccatggtagaaaaggaaatatcttcgtataaaaactagacagaatgattctcagaaactcctttgtgatgtgtgcgttcaactcacagagtttaacctttcttttcatagagcagttaggaaacactctgtttgtaaagtctgcaagtggatattcagacctctttgaggccttcgttggaaacgggtttttttcctgtaaggctagacagaagaattcccagtaacttccttgtgttgtgtacattcaactcacagatttgaacgttcccttagacagagcagatttgaaacactctttttgtgcaattggcaagtggagatttcaagcgctttaaggtcaatggcagaaaaggaaatatcttcgtttcaaaactagacagaatcattcccacaaactgcgttgtgctgtgttcgttcaactcacagagtttaacctttgttttcatagagcagttaggaaacagtctgtttgtaaattctgtaagtggatattctgacatcttgtggccttcgttggaaacgggttttcttcatattctgctagacagaagaattcccagtaacttccttgtgttgtgtacattcaactcacagagttgaacgttcccttagacagagcagatttgaaacactctttttgtgcaattggcaaatggagatttcaagcgctttaagttcaatggcagaaaaggaaatatcttcgtttcaaaactagacagaatcattcccacaaactgcgttgtgatgtgttcgttcaactcacagagtttaacctttccgttcatagagcagttaggaaacacactgtttgtaaagtctgtaagtggatattctgacatcttgtggccttcgttggaaacgggatttcttcatattctgctagacggaaggaattctcagtaacttccttgtgttgtgtgtattcaacttacagagttgaacgatttcttacacagagcagagttgaaacactctttttctggaatttgcaagtggagattacagccgctttgaggtcaatggtagaataggaaatatgttcctatagaaactagacagaacgattctcagaaactcctttgtgatgtgtgcgttcaactcacagagtttaacctttcttttcatagagcagttaggaaacactctgtttgtaaagtctgcaagtggatattctgacctctttgaggccttcgttggaaacgggatttcttcatattctgctagacagaagaattcccagtaacttccttgtgttgtgtgtgttcaactcacagagttgaactttcatttacacagagcagatttgaaacactctttttgtggaatttgcaagtggagatttcaagcgctttgagaccaaaggcagaaaaggaaatatcttcgtttcaaaactagacagaatcattctcagaaactgctctgtgatgtgtgcgttcaactctcagagtttaacttttcttttcattcagcagtttggaaacactcagtttgtaaagtctgcacgtggatattttgaccacttagaggtcttcgttggaaacgggtttttttcatgtaaggctagacagaagaattcacagtaacttccttgtgttgtgtacattcaactcacagagttgaacgttcccttagacagagcagatttgaaacactctttttgtgcaattggcaagtggagatttcaagcgctttaaggtcaatggcagaaaaggaaatatcttcctttcaaaactagacagaatgattctcagaaactcctttgtgatgtgtgcgttcaactcacagagtttaacctttcttttcatagagcagttaggaaacactctgtttgtaaagtctgcaagtggatatgcagacatccttgaggctttcgttggaaacgggatttcttcatattctgctagaaagaagaattctcagtaacttcctcgtgttgtgtgtattcaactcacagagttgaacgatcctttacacagagcagacttgaaacactctttttgtggaatttgcaagtggagatttcagccgctttgaggtcaatggtagaataggaaatatcttcctatagaaactagacagaatgattctcagaaactcctttgtgatgtgtgcgttcaactcacagagtttaacctttctgttcatagagcagttaggaaacactctgtttgtaaagtctgcaagtggatattcagacccctttgaggccttcgttggaaacgggatttcttcatattctgctagacagaagaattcgcagtaacttccttgtgttgtgtgtattcaactcacagagtttaacgatcctttacacagagcggacttgaaacactctttttgtggaatttgcaagtggagatttcagccgctttgaggtcaatggtagaaaaggaaatatcttcgtataaagactagacagaatgattctcataaactcctttgtgatgtgtgcgttcaactcacagagtttaacttttcatttcatagagcagttaggaaacactctgtttgtaatgtctgcaagtggatattcagacctctttgaggccttcattggaaacgggatttcttcatattatgctagacagaagaattctcagtaacttccttgtgttgtgtgtattcaactcacagagttgaacgatcctttacacagagcagacttggaacactctttttgtggaatttgcaagtggagatttctgccgcgttgaggtcaatggtagaaaaggaaatatcttcgtataaaaactagacagaatgattctcagaaactcctttgagatgtgtgtgttcaactcacagtttaacctttcttttcatagagcagttaggaatcactctgtttgtaaagtctgcaagtggatatacagacctctttgaggccttcgttggaaacgggtttttttcatataaggctagacagaagaattcccagtaacttccttgtgttgtgtgtgttcaactcacagagttgaactttcatttacacagagcagatttgaaacactctttttgtggaatttgcaagtggagatttcagccgctttgaagtcaaatgtagaaaaggaaatatcttcctataaaaactagacagaatgattctcagaaactcctttgtgatgtgtgcgttcaactcacagagtttaacctttcttttcatagagcagttagggaacactctgtttgtaaagtctgcaagtggatattcagacctctttgaggccttcgttggaaacgggatttcttcatattatgctagacagaagaattcccagtaacttgccttgtgttgtgtgtgttcaactcacagagttgaactttcatttacacagagcagatttgaaacactaattttgtggaatttgcaagtggagatttcaagcgctttgaggccaaaggcagaaaaggaaatatcttcgtataaaaactagacagaatcattctcagaaactgctgcgtgatgtgtgcgttcaactctcagagtttaacttttcttttcattcagcggtttggaaacactctgtttgtaaagtctgcacgtggatattttgaccacttagaggccttcgttggaaacgggtttttttcatgttaggctagacagaagaattcccaggaacttccttgtgttgtgtacattcaactcacagagttgaacgttcccttagacagagcagatttgaaacactctttttgtgcaattggcaagtggtgatttcagcagctttgaggtcaatggtagaaaaggaaatatcttcgtataaaaactagacagaatcattcccacaaactgcgttgtgatgtgttcgttcaactcacagagtttaacctttcttttcatagagcagttaggaaacagtctgtttgtcaattctgtaagtggatattctgacatcttgtggccttagttggaaacgggatttcttcatattctgctagacagaagaattctcagtaacttccttgtgttgtgtgtattcaactcacagagttgaacgatcctttacacagagcagacttgaaacactctttttgtggaatttgcaagtggagatttcagccgctttgggttcaatggtagaataggaaatatcttcctatagaaactggacagaatgattctcagaaactcctttgtgaagtgtgcgttcaactcacagagtttaacctttctttccatagagcagttaggaaacactctgtttgtaaagtctgcaagtggatattcagacctctttgaggccttcgttggaaacgggatttcttcatattctgctagacagaagaattctcagtaacttccttgtgttgtgtgtattcaactgacagagttgaactttcatttagagagagcagatttgaaacactgtttttgtggaatttgtaagtggagatttcaagcgctttggggccaaaggcagaaaaggaaatatcttcgtataaaaactagacagaatcgttctcagaaactgctctgcgatgtgtgcgttcaactctcagagtttaacttttcttttcattcagcagtttggaaacactctgtttctaaagtctgcacgtggataatttgaccacttagaggccttcgttggaaacgggtttttttcatgtaaggctagacagaagaattctcagtaacttccttgtgttgtgtgtattcaactcacagagttgaacgatcctttacaaagagcagatttgtaacactctttttgtggaatttgcaagtggagatttcaagcgctttaaggtcaatggcagaaaaggaaatatcttcgtttcaaaactagatagaatcattcccacaaactgcgttgtgatgtgttcgttcaactaacagagtttaacctttcttttcatagagcagttaggaaacagtctgtttgtaaattctgtaagtggataatctgacatattgtggcctttgttggaaacaggatttcttcttattctgctagacagaagaattctcagtaacttccttgtgttgtgtgtattcaactcacagagttgaacgatcctttacacagagcagacttgaaacactctttttgtggaatttgcaaatggagatttcagccgctttgaggtcaatggtagaataggaaatatcttcctatagaaactagacagaatgattctcataaactcctttgtgatgtgtgcgttcaactcacagagtttaacctttcttttcatagagcagttaggaaacactctgtttgtaaagtctgcaagtggatattcagaccctcttgaggccttcgttggaaacgggatttcttcatattctgctagacagaagaattctcagtaacttcccttgtgttgtgtgtgttcaactcacagagttgaactttcatttacacagagcagattggaaacactctttttgtggaatttgcaagtggagatttcaagcgctttgaggccaaaggcagaaaaggaaatatcttcgtataaaaactagacagaatcattctcagaaactgctctgcgatgtgtgcgttcaactctcagagttttactttgcttttcattcagcagtttggaaacactctgtttgtaaagtctgcacgtggataatttgaccacttagaggccttcgttggaaacgggtttttttcatgtaaggctagacagaagaattcccagtaacttccttgtgttgtgtacattcaactcacagagttgaacgttcccttagacagagcagatttgaaacactatttttgtgcaattggcaaatggagatttcaagggctttaaggtcaatggcagaaaaggaaatatcttcgtttcaaaactagacagaatgattctcataaactcctttgtgatgtgtgcgttcaactcacagagtttaacctttctgttcatagagcagttaggaaacactctgtttgtaaagtctgcaagtggatattcagacctccttgaggccttcgttggaaaagggatttcttcatattctgctagacagaagaattctcagtaacttccttgtgttgtgtgtattcaactcacagagttgaacgatcctttacacagagcagacttcaaacactctttttgtggaatttgcaagtggagatttcagccgctttgaggtcaatagtagaaaaggaaatatcttcgtagaaaaactaggcagaatgattcccagaaactcctttgtgatgtgtgcattcaactcacagagtttaacttttcttttcatagagcagttaggaaacactctgtttgtaaagtctgcaagtggatattcagacctctttgaggccttcgttggaaacgggatttcttcatattatgctagacagaagaattcccagtaacttccttgtgttgtgtgtgttcaactcacagagttgaactttcatttagacagagcagatttgaagcactctttttgtggaatttgcaagtggagatttcaagcgctttgaggccaaaggcagaaaaggtaatatcttcgtttcaaaactagccagaatcattctcagaaactgctctgcgatgtgtgcgttcaactctcagagtttaacttttcttttcattcagcagtttggaaacactctgtttgtaaagtctgcacgtggataatttgaccacttagaggccttcgttggaaacgggtttttttcatgcaaggctagacagaagaattcccagtaacttccttgtgttgtgtacattcaactcacagagttgaacgttcccttagacagagcagatttgaaacactctttttgtgcaattggcaagtggagatttcaagagttttaaggtcaatggcagaaaaggaaatatcttcgtttcaaaactagacagaatcattcccacaaactgcgttgtgatgtgttcgttcaaatcacagagtttaacctttcttttcatagagcagttaggaaacagtctgtttgtaaattctgtaagtggatattctgacatcttgtggccttcgttggaagcgggatttcttcatattctgctagacagaagaattctcagtaacttccttgtgttgtgtgtattcaactcacagaggtgaacgatcctttacagagagcagacttgaaacactctttttgtggaatttgcaagtggagatttcagccgctttgaggtcaatggtagaataggaaatatcttcctatagaaactagacagaatgattctcagaaactcctttgtgatgtgtgcgttcaactcacagagtttaaccttccttttcatagagcagttaggaaacactctgtttgtaaagtctgcaagtggatattcagacctctttgaggccttcgttggaaacgggtttttttcatataaggctagacagaagaattcccagtaacttccttgtgttgtgtgtgttcaactcacaaagttgaactttcatttacacagagcagatttgaaacactctttttgtggaatttgcaagtggagatttcaagcgctttgaggccaaaggcagaaaaggaaatatctccgtttcaaaactagacagaatcattctcagaaactgctctgtgatgtgtgcgttcatctcacagggtttaacttttcttttctttcagcagtttggcaacactctgtttgtaaaatctgcacgtggatattttgaccacttagaggccttcgttggaaacgagtttttttcatgtaaggcaatacagaagaattcccagtaacttcccttgtgttgtgtgcattcaactcacacagatgaacgttcccttagacagagcagatttgaaacactctatttgtgcaatttgcaagtgtagatttcaagcgctttaaggtcaatggcagaaaaggaaatatcttcgtttcaaaactagacagaatcattcccacaaactgcgttgtgatgtgttcgttcaactcacagagtttaacctttctgttcatagaccagttaggaaccactctgcttgtaaagtctgtaagtggatattctgacgtcttgtggccttaattggaaatgggatttcttcgtattctgctagacagagaattctcagtaactgccttgtgttgtgtgtattcaactcacagagttgaacgatcctttacacagagcagacttgaaacactctttttgtggaatttgcaagtggagatttcagccgctttgaggtcaatggtagaataggaaatatcttcctatagaaactagacagaatgattctcagtaagttctttgtgatgtgtgcgttcaactcacagggttcaacctttcttttcatagagcagttaagaaacactctgtttgtaaagtcttcaagtggatattcatacctctttgaggccctcgttggaaacgggatttcttcatattatgctagacagaagaattctcagtaacttccttgtgttgtgtgtattcaactgacagagttgaactttcatttagagagagcagatttgaaactctgtttttgtggaatttgcaagtggagatttcaagcgctttggggccaaaggcagaaaaggaaatatcttcgtataaaaactagacagaatcattctcagaaactgctctgcgatgtgtgcgttcaactctcagagtttaacttttcttttcattcagcagtttggaaacactctgtttgtaaagtctgcacgtggatattttgaccatttagaggccttcgttggaaacgggtttttttcttgtaaggctagacagaagaattcccagtaactttccttgtgttgtgtacattcaactcacagagttgaacgttcccttagacagagcagatttgaaacactctttttgtgcaattggcaaatggagatttcaagcgctttaagttcaatggcagaaaaggaaatatcttcgtttcaaaactagacagaatgattctcagaaactcctttgagatgtgtgcgttcaactcacagagtttaacctttcttttcatagagcagttaggaaacactctgtttgtaaactctgcaagtggatattcagacctctttgaggctttcgttggaaacgggatttcttcatactatgctagacagaagaattctcagtaacttccgcgtgtacagagcagacttgaaacactctttttgtggaatttgcaagtggagatttcagccgctttgaggtcaatggtagaaaaggaaatatcttcctataaaaactagacagaatgattctcagaaactcctttgtgatgtgtgcgttcaactcacagagttcaacctttcttttcatagagcagttgggaaacactctgtttgtaaagtctgcaagtggatattcagacttctttgaggcctccgttggaagagggatttcttcatattctgctagacagaagaattcccagtaacttccttgtgttgtgtgtgttcaactcacagagttgaactttcatttacccagagcagatttgaaaccctctttttgtggaatttgcaagtggagatttcaagcactttgaggccaaaggcagaaaaggaaatatcttcgtttcaaaactagacagaatcattctcagaaactgctctgcgatgtgtgcgttcaactctcagagtttaacttttcttttcattcagcagtttggaaacactctgtttgtaaagtctgcacgtggatattttgaccacttataggccttcgttggaaacgggtttttttcctgtaaggctagacagaagaattctcagtaacttccttgtgttgtgtacattcaactcacagagttgaacgttcccttagacagagcatatttgaaacactctttttgtgcaattggcaagtggagatttcaagcgctttaaggtcaatggcagaaaaggaaatatcttcgtttcaaaactagacagaatcattcccacaaactgcgttgtgatgtgttcgttcaactcacagagtttaacttttctgttcatagagcagttaggaaacactctgtttgtaaagtctgtaagtggatattctgacatcttgtggccttcgttggaaacgggatttcttcctattctgctagacagaagaactctcagtaacttccttgtgttgtgtgtattcaactcacagagttgaacgatcctttacacagagcagacttgaaacattcttttcgtggaatttgcaactggtgatttcagccgctttgaggtcaatggtagaataggaaatatcttcctatagaaactagacagaatgattctcagaaactcctttgtgatgtgtgcgttcaactcacagagtttaaccttttttttcatagagcagttaggaaacactctgtttgtaaagtctgcaagtggatattcagacgtctttgaggccttcgttggaaacgggatttcttcatactatgctagacagaagaattcccagtaacttccttgtgttgtgtgtgttcgactcacagagttgaactttcatttacacagagcagatttgaaacactctttttgtggaatttgcaagtggagatttcaagcgctttgaggccaaaggcagaaaaagaaatatcttcgtttcaaaactagacagaatcattctcagaaactgttctgcgatgtgtgcgttcaactctcagagtttaacttttcttttcattcagcagtttggaaacactctgtaaactctgcatgtggatattttgaccacttagaggccttcgttggaaacgggtttttttcctgtaaggctagacagaagaattcccagtaacttccttgtgttgtgtacattcaactcacagagttgaacgttcccttagacagagcagatttgaaacactctttttgtgcaattggcaagtggtgatttcagccgctttgaggtcaatggtagaaaaggacatatcttcgtataaaaactagacagaatcattcccacaaactgcgttgtgatgtgttcgttcaactcacagagtttaacctttcttttcatagagcagttaggaaacaagtctgtttgtcaattctgtaagtggatattctgacatcttgtggccttcgttggaaacgggatttcttcatattctgctagacagaagaattctcagaatcttccttgtgttgtgtgtattcaactcacacagttgaacgatggtttacacagagcagatttgaaacactctttttgtggagtttggaagtggagatttcagccgctttgaggtcaatggtagaaaaggaaatatcttcgtataaaaactagacagaatgattctcacaaactcctttgtgatgtgtgcgttcaactcacagagtttaagctttcttttcatagagcagttgggaaacactctgtaaagtctgcaagtggatattcagacctctttgaggctttcgttggaaacgggatttcttcatattctgctagacagaagaattctcagtaacttccttgtgttgtgtgtattcaactcacagagttgaccgatcctttacacagagtagacttgtaacactctttttgtggaatttgcaagtggagatttcagccgctttgaagtcaaaggtagaaaagggaatatcttcctataaaaactagacagaatcattctcataaactgctgcgtgatgtgtgcgttcaactctcagagtttaacttttcttttcattcagcggtttggaaacactctgtttgtaaagtctgcacgtggatattttgaccacttagacgccttcgttggaaacgggtttttttcatgtaaggctagacagaagaattcccagtaacttccttgtgttgtgtacattcaactcacagagttgaacgttcccttagacagagcagatttgaaacactctttttgtgcaattggcaagtggagatttcaagcgctttgaggtcaatggcagaaaaggaaatatcttcgtttcaaaactagacagaatcattgccacaaactgcgttgtgatgtgttcgttcaactcacagagtttaacctttcttttcatagagcagttaggaaacagtctgtttgtaaattctgtaagtggatattctgacagcttgtggccttcgttggaaacgggatttcttcatactatgctagacagaagaattctcagaatcttccttgtgttgtgtgtattcaactcaccgagttgaacgatcctttacacagagcagacttgaaacactctttttgtggaatttgcaagtggagatttcagccgctttgaggtccatgttagaaaaggaaatatcttcgtacaaaaactagacagaatgattctcagaaacttctttgtgatgtgtgccttcaactcacagagtttaacctttcttttcatagagcagttaggaaacactctgcttgtaaactctgcaagtggatattcagacctctttgaggccttcgttggaaacgggatttctccatactatgctagacagaagaattcccagtaacttccttgtgttgtgtgtgttcaactcacagagttgaactttcatttacacagagcagatttgaaacactctttttgtggaatttgcaaatggagatttcaagcgctttgaggccgaaggcagaaaaggaaatatcttcgtataaaaactagacagaatcattctcagaaactgctctgcgatgtgtgcgttcaactctctgagtttaacttttcttttcattcagcagtttggaaacactctgtttgtaaagtctgcacgtggataacttgaccacttagaggccttcattggaaacgggtttttttcatgtaaggctagacagaagaattcccagtaacttccttgtgttgtgtgcattcaactcacagagttgaacgttccttagacagagcagatttgaaacactctatttgtgcaatttgcaagtgtaggtttcaagcgctttaaggtcaatggcagaaaaggaaatatcttcgtttcaaaactagacagaatcattcccacaaactgcgttgtgatgtgttcgttcaactcacagactttaacctttcttttcatagagcagttaggaaacactctgtttgtaaagtctgtaagtggatattctgacatcttgtggccttcgttggaaacgggatttcttcatattctgctagacagaagaattctcagtaacttccttgtgttgtgtgtattcaactcacagagttgaacgatcctttacacagagcagacttgaaacactctttttgtggaatttgcaagtggagatttcagccgctttgaggtcaatgatagaaaaggaaatatcttcgtataaagactagacagaatgattctcagaaactcctttgtgatgtgtgcgttgaattcacaaaatttaacatttcttttcatagagcagttaggaaacaccctgtttgtaaagtctgcaagtggatattcagacctctttgaggccttcgttggaaacgggatttcttcatattctgctagacagaagaattcccagtaacttccttgtgttgtgtgtgttcaactcacagagttgaactttcatttacacagagcagatttgaaacactctttttgtggaatttgcaagtggagatttcaagcgctttggggccaaaggcagaaaaggaaatatcttcgtataaaaactagacagaatcattctcagaaactgctctgcgatgtgtgcgttcaactctcagagtttaacttttcttttcattcagcagtttggaaacactctgtttgttaagtctgcacgtggatattttgaccacttagaggccttcgttggaaacgggtttttttcctgtaaggcttgacagaagaattcccagtaacttccttgtgttgtgtacattcaactcacagagttgaacgttcccttagacagagcagatttgaaacactctttttgtgcaattggcaagtggtgatttcagccgctttgaggtcaatggtagaaaaggaaatatcttcgtataaaaactagacagaatgattctcagaaacttcattgtgatgtgtgcgttcaactcacagagtttaacctttcttttcatagagcagttaggaaacactctgtttgtgaactctgcaagtggatattcagacgtctttgaggccttcgttggaaatgggatttcttcatactgtgctagacagaagaattctcagtaacttccttgtgttgtgtgtattgaactcgcagagttgaacgatcctttacacagagcagacttgaaacactctttttgtggaatttgcaagtggagatttcagccgctttgaggtcaatagtagaaaatgaaatatcttcgtagaaaaactagacagaatgattctcataaactcctttgtgatgtgtgcgttcaactcacagagtttaacttttcttttcatagcagcagttaggaaacactctgtttgtaaagtctgcaagtggatattcagacctctttgaggccttcgttggaaacgggatttcttcatattctgctagacagaagaattctcagtaacttccttgtgttgtgtgtattcaactcacagacttgaacgatcctttacacagagcagacttgaaacactctttttgtggaatttgcaaatggagatttcagccgctttgaggtcaatagtagaaaaggaaatatcttcgtagaaaaactagacagaatgattctcagaaaatcttttgtgatctgtgcgttcaactcacagagtttaacttttcttctcatagagcagttaggaaacactctgtttgtaaagtctgcaagtggatattcagacctctttgaggccttcgttggaaacgggatttcttcatattctgctagacagaagaattcccagtaacttccttgtgttgtgtgcattcaactcacagagttgaacgttcacttagacagagcagatttgaaacactctatttgtgcaatttgcaagtgtagatttcaagcgctttaaggtcaacggcagaaaaggaaatatcttcgtttcaaaactagacagaatcattcccacaaactgcgttgtgatgtgttcgttcaactcacagagtttaacctttcttttcatagagcagttaggaaacagtctgtttgtcaattctgtaagtggatattctgacatcttgtgtccttagttggaaacgggatttcttcatattctgctagacagaagaattctcagtaacttccttgtgttttgtgtattcaactcacagagttgaacgatccttttcacagagcagacttgaaacactctttttgtggaatttgcaagtggagatttcagccgctttgaggtcaatagtagaaaaggaaatatcttcgtagaaaaactagacagaatgattctcagaaactcctttgtgatgtgtgcgttcaactcacagagtttaacctttcttttcatagagcagttaggaaacactctgtttgtaaagtctgcaagtggatattcagacctctttgaggccttcgttggaaacgggattttttcatataaggctagacagaagaattctcagtaacttccttgtgttgtgtgtattcaactgacagagttgaactttcatttagagagagcagatttgtaagactgtttttgtggaatttgcaagtggagatttcaagcgctttgcggccaaaggcagaaatggaaatatcttcgtataaaaactagacagaatcattctcagaaaatcctctatgatgtgtgcgttcaactctcagagtttaacttttcttttcattcagcagtttgaaaacactctgtttgtaaagtctgcacgtggatattttgaccacttagaggccttcgttggaaacgggtttttttcatgtaagggtagacagaagaattcccagtaacttccttgtgttgtgtgcattcaactcacagagttgaaagttcccttagacagagcagatttgaaacactctatttgtgcaatttgcaagtgtagacttcaagcgctttaaggtcaacggcagaaaaggaaatatcttcgtttcaaaactagacagaatgattctcagaaactcctttgtgatgtgtgcgttcaactcacagagtttaacctttcttttcatagagcagttaggaaacactctgtttgtaaagtctgcaagtggatattcagacctctttgaggccttcgttggaaacgggttttcttcatattctgctagacagaagaattctcagtaacttccttgtgttgtgtgtattcaactcacagagttgaacgatcctttacacagagcagtcttgaaacactctttttgtggaatttgcaagtggagatttcagccgctttgaggtcaatagaagaaaaggaaatatcttcgtagaaaaactaggcagaatgattctcagaaactcctttgtgatgtgtgcgttcaactcacagagtttaacctttcttttcatagagcagttaggaaacactctgtttgtaaagtctgcaagtggatattcagacatccttgaggctttcgttggaaacgggatttcttcatattctgctagaaaaaagaattctcagtaacttccttgtgttgtgtgtattcaactcatagagttgaacgatcctttacacagagcagacttgtaacactctttttgtggaatttgcaagtggagatttcaagcgctttgaggccaaaggcagaaaaggaaatatcttcgtttcaaaactagacagaatcattctcagaaactgctctgcgatgtgtgcgttcaactctcagagtttaacttttctttagcattcagcagtttggaaacactctgtttgtaaagtctgcacgtggatattttgaccacttagaggccttcgttggaaacgggtttttttcctgtaaggctagacagaagaattcccagtaacttccttgtgttgtgtgcattcaactcacagagttgaacgttcccttggacagagcagatttgaaacactctatttgtgcaatttgcaagtgtagatttcaagcgctttaaggtcaacggcagaaaaggaaatatcttcgtttcaaaactagacagaatcattcccacaaactcgcgttgtgatgtgttcgttcaactcacagagtttaacctttctgttcatagagcagttaggaaacactcagtttgtaaagtctgtaagtggatattctgacatcttgtggccttcgttggaaacgggatttcttcatattctgctagacagaagaattctcagaatcttccttgtgttgtgtgtattcaactcacacagttgaacgatggtttacacagagcagatttgaaacactctttttgtggaatttgcaagtggagatttcagccgctttgaggtcaatggtagaaaatgaaatatcttcgtataaaaactagacagaatgattctcataactcctttgtgatgtgtgcgttcaactcacagagttcaacctttcttttcatagagcagttgggaaacactctgtttgtaaagtctgcaagtggatattcagacttctttgaggccttcgttggaagcgggatttcttcatattctgctagacagaagaattctcagtaactgccttgtgttgtgtgtattcaactcacagagttgaacgatcctttacacagagaagacttgaaacactctttttgtggaatttgcaagtggagatttcagccgctgtgaggtcaatggtagaataggaaatatcttcctatagaaactagacagaatcattctcagaaactgctgcgtgatgtgtgcgttcaactctcagagtttaacttttcttttcattcagcggtttggaaacactctgtttgtaaagtctgcacgtggatattttgaccacttagaggccttcgttggaaacgggtttttttcatgtaaggctagacagaagaattcccagtaactttccttgtgttgtgtgcattcaactcacagagctgaacgttcccttagacagagcagatttgaaacactctatttgtgcaatttgcaagtgtagatttcaagcgctttaaggtcaatggcagaaaaggaaatatcttcgtttcaaaactagacagaatcattcccagaaactgcgttgtgatgtgttcgttcaactcacagagtttaacctttctgttcatagagcagttaggaaacactctgtttgtaaagtctgtaagtggatattctgacatcttgtggccttcgttggaaacgggatttcataatattctcctagacagaagaattctcagaatcttccttgtgttgtgtgtattcaactcacagagttgaacgatggtttacacagagcagatttgaaacactcttttggtggaatttgcaagtggagatttcagccgctttgaggtcaatggtagaaaaggaaatatcttcgtataaaaactagacagaatgattctcagaaactcctttgtgatgtgtgcgttcaactcacaaagtttaacctttcttttcatagagcagttaggaaacactctgtttgtaaagtctgcaagtggatattcagacctctttgaggccttcgttggaaacgggatttcttcatattctgctagacagaagaattctcagtaacttccttgtgttgtgtgtattcaactgacagagttgaactttcatttagagagagcagatttgaaacactgtttttgtggaatttgcaagtggagatttcaagcgctttggggccaaaggcagaaaaggaaatatcttcgtataaaaactagacggaatcattctcagaaactgctgcgtgatgtgtgcgttcaactctcagagtttaacttttcttttaattcagcggtttggaaacactctgtttgtaaagtctgcacgtggatattttgaccacttagaggccttcgttggaaactggttttttgcatgtaaggctagacagaataattcccagtaacttccttgtgttgtgtgcattcaactcacagagttgaacgttcccttagacagagcagatttgaaacactctatttgtgcaatttgcaagtgtagatttcaagcgctttaaggtcaatggcagaaaaggaaatatcttcgtttcaaaagtagacagaatgattctgagaaactcctttgtgatgtgtgcgttcaacacacagagtttaacctttcttttcatagagcagttaggaaacactctgtttgtaaagtctgcaagtggatattcagacctccttgaggccttcgttggaaacgggatttcttcatattctgctagacagaagaattctcagtaacttccttgtgttttgtgtattcaactcacagagttgaatgatcctttacacagaacagacttgaaacactcttgttgtggaattttcaagtggagatttcagccgctttgaggtcaacggtagaataggaaatatcttcctatagaaactagacagaatgattctcagaaactcctttgtgatgtgtgcgttcaactcacagagtttaacttttcttttcatagagcagttaggaaacactctgtttgtaaagtctgcaagtggatattcagacctctttgtggccttcgttggaaacgggatttcttcatattatgctagacagaataattctcagtaacttccttgtgttgtgtgtattcaactctcagagttgaacgatcctttacagagagcagacttgaaacactctttttctggaatttgcaagtggagatttcagccgctttgaggtcaatggtagaataggaaatatcttcctatagaaactagacagaatcattctcagaaactgctctgcgatgtgtgcgttcatctctcagagtttaacttttcttttcattcagcagtttggaaacactctgtttgtaaagtctgcacgtggatattttgaccacttagaggccttcgttggaaacgggtttttttcctgtaaggctagacagaagaattcccagtaacttcccttgtgttgtgtacattcaactcacagagttgaacgttcccttagacagagcagagttgaaacactctttttgtgcaattggcaagtggagatttcaagcgctttaaggtcaatggcagaaaaggaaatatcttcgtttcaaaactagagagaatcattcccacaaactgtgttgtgatgtgttcgttcaactcacagagtttaacctttcttttcatagagcagttaggaaacagtctgtttgtaaattctgtaagtggatattctgacatcttgtggccttcgttggaaacgggatttcttcatattctgctagacagaagaattctcagtaactgccttgtgttgtgtgtattcaactcacagagttgaacgatcctttacacagagcagacttgaaacactccttttgtggaatttgcaagtggagatttcagccgctttgaggtcaatggtagaataggaaatatcttcctatagaaactagacagaatgattctcagaaacttctttgtgcgttcaactcacagagtttaacctttcttttcatagagcagttaggaaacactctgtttgtaaagtctgcaagtggatattcagacctgtttgaggccttcgttggaaacgggatttcttcatactatgctagacagaagaattcccagtaacttccttgtgttgtgtgtgttcaactcacagagttgaactttcatttaaacagagcagatttgaaacactctttttgtggaatttgcaagtggagatttcaagcgctttgaggccaaaggcagaaaaggaaatatcttcgtaaaaaaatagacagaatcattctcagaaactgctctgcgatgtgtgcgttcaactctcagagtttaacttttcttttcattcagcagtttgaaaaccctctgtttgtaaagtctgcacgttgataatttgaccacatagaggccttcgttggaaacgggtttttctcatgtaaggctagacagaagaattcccagtaacttccttgtgttgtgtgcattcaactcacagagttgaacgttccctttgacagagcagatttgaaacactgtatttgtgcaatttgcaagtgtagatttcaagcgctttaaggtcaatggcagaaaaggaaatttcttcgtttcaaaactagacagaatcattcccacaaactgcgttgtgatgtgttcgttcaactcacagagtttaacctttctgttcatagagcagttaggaaacactctgtttgtaaagtctgtaagtggatattctgacatcttgtggccttcgttggaaacgggatttcttcgtattctgctagacagaagaattctcagtaacttccttgtgttgtgtgtattcaactcacagagttgaacgatcctttacacagagcagacttgaaacactctttttgtggaatttgcaagtgtagatttcagccgctttgaggtcaatggtagaataggaaatatcttcctatagaaactagacagaatgattctcataaactcctttgtgatgtgtgcgttcaaatcacagagtttaacttttcttttcatagagcagttaggaaacactctgtttgtaaagtctgcaagtggatattcagacctctttgaggccttcgttggaaacgggatttcttcatattatgctagacagaagaattcccagtaacttccttgtgttgtgtgtgttcaactcacagagttgaactttcatttacacagagcagatttcaaacactctttttgtggaatttgcaagtggagatttcaagcgctttgaggccaaaggcagaaaaggaaatatcttcgtataaaaactagacagaatcattctcagaaactgctctgcgatgtgtgcattcaactctcagagtttaacttttcttttcattcagcagtttggaaacactctgtttgtaaagtctgcacgtggatattttgaccacttagaggccttcgttggaaacgggtttttttcctgtaaggctagacagaagaattcccagtaacttccttgtgttgtgtatattcaactcacagagttgaacgttcccttagacagagcagatttgaaacactctttttgtgcaattggcaagtggacatttcaagcgctttgaggtcaatggcagaaaaggaaatatcttcgtttcaaaactagacagaatcattcccacaaactgcgttgtgatgtgttcgttcaactcacagagtttaacctttctgttcatagagcagttaggaaacactctgtttgtaaagtctgtaagtggatattctgacatcttgtggcctacgttggaaacgggatttctccatattctgctagacagaagaattctcagtaacttccttgtgttgtgtgtattcaactcacagaagttgagcgatcctttacacagagcagacttgaaacactctttttgtggaatttgcaagtggagatttcagccgctttgaggtcaatggtagaataggaaatatcttcgtatagaaactagacagaatgattctcagaaaatcctttgtgatgtgtgcgttcaactcacagagtttaacttttcttttcatatagcagttaggaaacactttgtttgtaaagtctgcaagtggatattcagacctctttgaggcattcgttggaaacgggatttctccatattatgctagagtgaagaattctcagtaacttccttgtgttgtgtgtattcaactgacagagttgaactttcatttagagagagcagatttgaaacactgtttttgtggaatttgcaattggagatttcaagcgctttggggccaaaggcagaaaaggaaatatcttcgtataaaaactagacggaatcattctcagaaactgctctgcgatgtgtgcgttcaactctcagagtttaacttttcttttcattcagcagtttggaaacactctgtttgtaaagtctgcacgtggatattttgaccacttagaggccttcgttggaaacgggtttttttcccgtaaggctagacagaagaattctcagtaacttccttgtgttgtgtgtattcaactcacagagttgaacgttcccttagacagagcagatttgaaacactctatttgtgcaatttgcaagtgtagttttcaagctctttaaggtcaacggcagaaaaggaaatatcttcgtttcaaaactagacagaatcattcccacaaactgcgttgtgatgtgttcgttcaactcacagagtttaacctttctgttcatagagcagttaggaaacactctgtttgaaaagtctgcacgtggatattcagacctctttgaggccttcgttggaaacgggatttcttcctattctgctagacagaagaattctcagtaacttcccttgtgttgtgtgtattcaactcacagagttgaacgatcctttacacagagcagacttgaaacactccttttgtggaatttgcaagtggagatttcagccgctttgaggtcaatggtagaataggaaatatcttcctatagaaactagacagaatgattctcagaaactcctttgtgatgtgtgcgttcaactcacagagttcaacctttcttttcatagagcagttaggaaacactctgtttgtaaagtctgcaagtggatattcagacttctttgaggctttcgttggaaacgggatttcttcatattctgctagacagaagaattctcagtaacttccttgtgttgtgtgtattcaactgacagagttgaactttcatttagagagagcagatttgaaacactgttcttgtggaatttgcaagtggagatttcaagcgctttggggccaaaggcagaaaaggaaatatcttcgtataaaaactagacagaatcattctccgaaactgctctgcgatgtgtgcgttcaactctcagagtttaacttttcttttcattcagcagtttggaaacactctgtttgtaaagtctgcacgtggataacttgaccacttagaggccttcgttggaaacgggtttttttcctgtaaggctagacagaagaattcccagtaacttccttgtgttgtgtacattcaactcacagagttgaacgttcccttagacagagcagatttgaaacactctttttgtgcaattggcaaatggagatttcaagcgctttaagttcaatggcagaaaaggaaatatcttcgtttcaaaactagacagaatgattctcagaaactccgttgtgatgtgtgcgttcaactcacagagtttaacctttcttttcatagagcagttaggaaacactctgtttgtaaagtctgcaagtggatattcagacctctttgaggccttcgttggaaacgggatttcttcatattctgctacagagaagaattctcagtaacttccttgtgttgtgtgtattcaactcacagagttcaacgatcctttacacagagcagacttgaaacactgtttttgtggaatttgcaagtggagatttcagccgctttgaggtcaatggtagaaaaggaaatatcttcctataaaaactagaccgaatgattctcagaaactcctttgtgatgtgtgtgtgttcaactcacagagtttaacatttcttttcatagagcagttaggaaacactctgtttctaaagtctgcaagtggatattcagacctctttgaggccttcgttggaaacgggtttttttcatataaggctagacagaagaattcccagtaactttccttgtgttgtgtgtgttcaactcacagagttgaactttcatttacacagagcagatttgaaacactctttttgtggaatttgcaaatggagatttcaagcgctttgaggccaaaggcagaaaaggaagtatcttcgtataaaaactagacagaatcattctcagaaactgctctgcgatgtgtgcgttcaactctcagagtttaacttttcttttcattcagcagtttggaaacactctgtttgtaaagtctgcacgtggataacttgaccacttagaggccttcgttggaaacgggtttttttcatgtaaggctagacagaagtattctcagtaacttccttgtgttgtgtgtattcaactcacagagttgaacgatcctttacacagagcagacttgtaacactctttttgtggaatttgcaagtggagatttcagccgctttgaagtcaaaggtagaaaaggaaataacttcctataaaaactagacagagtgattctcagaaactcctttgtgatgtctgcgttcaactcacagagtttaacctttcttttcatagagcagttaggacacactctgtttgtaaagtctgcaagtggatattcagacatctttgaggccttcgttggaaacgggatttcttcatgttctgctagacagaattctcagtaacttccttgtgttgtgtgtattcaactcacagagttgaacgatcctttacacagagcatacttggaacactctttttgtggaatttgcaagtggagatttcagccgctttgaagtcaaaggtagaaaaggaaatatcttcctataaaaactagacagaatgattctcagaaactcctttgtgatgtgtgcattcaactcacagagtttaacctttcttttcatagagcagttaggaaacactctgtttgtaaagtctgcaagtggatattcagacctctttgaggccttcgttggaaacgggtttttttcatataaggctagacagaagaattctcagtaacttccttctgttgtgtgtattcaactgacagagttgaactttcatttagagagagcagatttgaaacactgtttttgtggaatttgcaagtggagatttcaagcgctttggggccaaaggcagaaaaggaaatatcttcgtataaaaactagacagaatcattctcagaaactgctgcgtgatgtgtgcgtccaactctcagagtttaacttttcttttcattcagcggtttggaaacactctgtttgtaaagtctgcacgtggatattttgaccacttagaggtcttcattggaaacgggtttttttcatgtaaggctagacagaagaattcccagtaacttccttgtgttgtgtacattcaactcacagagttgaacgttcccttagacagagcagatttgaaacactctttttgtgcaattggcaagtggtgatttcagcctctttgaggtcaatggtagaaaaggaaatatcttcgtataaaaactagacagaatcattcccacaaactacgttgtgatgtgttcgttcaactcacagagtttaacctttctgttcatagagcagttaggaaacactctgtttgtaaagtctgtaagtggatattctgacatcttgtggccttcgttggaaacgggatttcttcatattctgctagacagaagaattctcagaatcttccttgtgttgtgtgtattcaactcacagagttgaacgatcctttacacagagcagacttgaaacactctttttgtggaatttgcaagtggagatttcagccgctttgaggtccatgggagaaaaggaaatatcttcgtataaaaactagacagaatgattctcagaaactcctttgtgatgtgtgcgttcaactcacagagtttaacctttcttttcatagagcagttaggaaacactctgtttgtaaagtctgcaagtggatattcagacctctttgaggccttcgttggaaacgggtttttttcatactatgctagacagaagaattcccagtaacttccttgtgttgtgtgtgttcaactcacagagttgaactttcatttacacagagcagatttgaaacactctttttttggaatttgcaagtggagatttcaagcgatttgaggccaaaggcagaaaaggaaatatcttcgtttcaaaactagacagaatcattctcagaactgctctgcgatgtgtgcgttcaactctcagagtttaacttttcttttcattcagcagtttggaaacactctgtttgtaaagtctgcacgtggatattttgaccatttagaggctttcgttggaaacgggtttttttcttgtaaggctagacagaagaattcccagtaacttccttgtgttgtgtgcattcaactcacagagttgaacgttcccttagacagagcagatttgaaacactctatttgtgcaatttgcaagtgtagatttcaagcgctttaaggtcaacggcagaaaaggaaatatcttcgtttcaaaactagacagaatcattcccacaaactgcgttgtgatggttcgttcaactcacagagtttaacctttcttttcatagagcagttaggaaacagtctgtttgtcaattctgtaagtggatattctgacatcttgtggccttcgttggaaacgggatttcttcatattctcctagacagaagagttctcagaaacttccttgtgttgtgtgtattcaactcacagagttgaacgatcctttacgcagagcagacttgaaacactctttttgtggaatttgcaagtggagatttcagccgctttgaggtcaatggtagaataggaaatatcttcctatagaaactagacagaatgattctcagaaactcctttgtgatgtgtgcgttcaactcacagagtataacctttcttttcatagagcagttaggaaacactctgtttgtaaagtgtgcaagtggatattcagacctctttgaggccttcgttggaaacggcatttcttcataatatgctagacagaagaattctcagtaacttccttgtgttgtgtgtattcaactcacagagttgaacgatcctttacacagagcagacttgaaacactctttttgtggaatttgcaagtgtagatttcagccgctttgagttcaatggtagaataggaaatatcttcctatagaaactagagagaatcattctccgaagctgctgcgtgatgtgtgcgttcaactctcagagtttaacttttcttttcattcagcggtttggaaacactctgtttgtgaagtctgcacgtggatattttgaccacttagaggccttcgttggaaacgggtttttttcatgtaaggctagacagaagatttcccagtaacttccttgtgttgtgtgcattcaactcacagagttgaacgttcccttagacagagcagatttgaaacactctatttgtgcaatttgcaagtgtagatttcaagcgctttaaggtcaatggcagaaaaggaaatatcttcgtcttcaaaactagacagaatgattctgtgaaactcctttgtgatgtgtgcgttcaactcacacagtttaacctttcttttcatagagcagttaggaaacactctgtttgtaaagtctgcaagtggatattcagacctccttgaggccttcgttggaaacgggatttcttcatattatgctagaaagaagaattcccagtaacttccttgtgttgtgtgtatacaactcacagagttgaacgatcctttacacagagcagacttgaaacactctttttgtggaatttgcaagtggagatttcagccgctttgagttcaatggtagaataggaaatatcttcctatagaaactagacagaaatgattctcaggaaactcctttgtgatgtgtgcgttcaactcacagagtttaacctttcttttcatagagcagttaggaaacactctgtttgtaaagtctgcaagtggatattcagacctctttgaggccttcgttggaaacgggtttttttcatataaggctagacagaagaattccctgtaacttccttgtgttgtgtgtgttcaactcacagagttgaactttcatttacacagagcagatttgaaactctccttttgtggaatttgcaagtggagatttcaagcgctttgaggccaaaggcagaaaaggaaatatcttcgtttcaaaactagacagaatcattctcagaaactgctctgcgatgtgtgcgttcaactctcagagtttaacttttcttttcattcagcagtttggaaacactctgtttgtaaagtctgcacgtggatattttgaccatttagaggccttcgttggaaacgggtttttttcttgtaaggctagacagaagaattcccagtaacttccatgtgttgtgtgcattcaactcacagagttgaacgttcccttgaacagagcagatttgaaactctctatttgtgcaatttgcaagtgtagatttcaagcgctttaaggtcaatggcagaaaaggaaatatcttcgtttcaaaactagacagaatgattctgagaaactcctttgtgatgtgtgcgttcaactcacagagtttaacctttcttttcatagagcagttaggaaacactctgtttgtaaagtctgcaagtggatattcagacatctttgaggctttctttggaaacgggatttcttcatattctgctagacagaagaattctcagaaacttcgttgtgttgtgtgttttcaactcacagagttcaacgatcctttacacagagtagacttgaaacactctttttgtggaattggcagggtggagatttcagccgctttgaggtcaatggtagaaaagtaaatatcttcgtataaaaactagacagaatgattgtcagaaactcctttgtgatgtgtgtgttcaactcacagagtttaacctttcttttcatagagcagttagtaaacactctgtttataaagtctgcaagtggatattcagacccctttgaggccttcgttggaaacgggatttcttcatattatgctagacagaagaattcccagtaacttccttgtgttgtgtgtgttcaactcacagagttgaactttcatttacccagagcagatttgaaacactgtttttgtggaatttgcaagtggagatttcaagcgctttgaggccaaaggcagaaaaggaaatatcttcgtttcaaaactagacagaatcattctttgaaactgctgcgtgatgtgtgcgttcaactctcagagtttaacttttcttttcattcagcggtttggaaacactctgtttgtaaagtctgcacgtggaaattttgaccacttagaggccttcgttggaaacgggtttttttcatgtaaggctagacagaagaattcccagtaacttccttgtgttgtgtgcattcaactcacagagttgaacgttcccttagacagagcagatttgaaacactctatttgtgcaatttgcaagtgtagttttcaagctctttaaggtcaacggcagaaaaggaaatatcttcgtttcaaaactagacagaatcattcccacaaactgcgttgtgatgtgttcgttcaactcacagagtttaacctttctgttcatagagcagttaggaaacactctgtttgtaaagtctgcaagtggatattcagacctctttgaggccttcgttggaaacgggatttcttcatattatgctacacagaagaattctcagtaacttccttgtgttgtttgtattcaactcacagagttgaacgatcctttacacagagcagacttgaaacactctttttgtggaatttgcaagtggagatttcagccgctttgaggtcaatggtagaaaaggaaactatcttcatataaagactagacagaatgattctgagaaatcctttgtgatgtgtgcgtacaactcacagagtttaacctttcttttcatagagcagttaggaaacactctgtttgtaaagtctgcaagtggatattcagacctccttgaggccttcgttggaaacgggatttcttcatattatgctagacagaagaattcccagtaacttccttgtgttgtgtgtgttcaactcacagagttgaactttcatttacacagagcagatttgaaacactctttttgtggaatttgcaaatggagatttcaagcgctttgaggccaaaggcagaaaaggaaatatcttcatataaaaactagacagaatcattctcagaaactgctctgtgatgtgtacgttcaactctcagagtttaacttttcttttcattcagcagtttggaaacactctgttcgtaaagtctgcacgtggataatttgaccacttagaggccttcgttggaaacgggtttttttcatgtaaggctagacagaagaattcccagtaacttccttgtgttgtgtgctttcaactcacagagttgaacgttcccttagacagagcagatttgaaacactctatttgtgcaatttgcaagtgtagatttcaagcgctttaaggtcaatggcagaaaaggaaatatcttcgtttcaaaactagacagaatcattcccacaaactgcgttgtgatgtgttcgttcaactcacagagttttacctttctgttcatagagcagttaggaaacactctgtttgtaaagtctgcaagtggatattcagacctccttgaggccttcgttggaaacgggatttcttcatattctgctagacagaagaattctgagtaacttccttgtgttgtgtgtattcaactcacagagttgaacgatcctttacagagagcagactttaaacactctttttgtggaatttgcaagtggagatttcagccgctttgaggtcaatggtagaaaaggaaatatcttcgtataaagactagacagaatgattctcagaaactcctttgtgatgtgtgcgttcaactcacagagtttaacttttcttttcatagagcagttaggaaacactctgtttgtaaagtctgcaagtggatattcagacctctttgaggccttcgttggaaacggcatttcttcatattatgctagacagaagaattctcagtaacttcctcgtgttgtgtgtattcaactgacagagttgaactttcatttagagagagcagatttgaaacactctttttgtggaatttgcaagtggagatttcaagcgctttggggccaaaggcagaaaaggaaatatcttcgtataaaaactagacagaatcattctcagaaactgctgtgtgatgtgtgcgttcaactctcagagtttaacttttcttttcattcagcggtttggaaacactctgtttgtaaagtctgcacgtggatattttgaccacttagaggccttcgttggaaacgggtttttttcatgtaaggctagacagaagaattcccagtaacttccttgtgttgtgtacattcaactcacagagttgaacgttcccttagacagagcagatttgaaacactctttttgtgcaattggcaaatggagatttcaagcgctttaaggtcaatggcaggaaaggaaatatcttcgtttcaaaactagacagaatcattcccacaaactgcgttgtgatgtgttcgttcatctcacagagtttaacctttcttttcatagagcagttaggaaacactctgtttgtaaattctgtaagtggatattctgacatcttgtggccttcgttggaaacgggatttcttcatattctgctagacagaagaattctcagcaacttccttgtgttgtgtgtattcaactcacaaagttgaacgatcctttgagcagacttgaaacactctttttgtggaatttgcaagtggagatttcagccgctttgaggtcaatggtagaaaaggaaatatcttcgaataaaaactagacagaatgattctaagaaactcctttgagatgtgtgcgttcaactcacagagtttaacctttcttttcatagagcagttaggaaacactctgtttgtaaagtctgcaagtggatattcagacctctttgaggccttcgttggaaacgggatttcttcatattctgctagaaagaagaattctcattaacttcattgtgttgtgtgtattcaactcacagagttcaacgatcctttacacagagcagacttgaaacactctttttctggaatttgcaagtggagatttcagccgctttgaggtcaatggtagaaaaagaaatatcttcctataaaaactagacagaatcattctcagaaactgctctgcgaggtgtgcgttcaactctcagagtttaacttttcttttcattcagcagtttggaaacactctgtttgtaaagtctgcacgtggatattttgaccacttagaggccttcgttggaaacgggtttttttcctgtaaggctagacagaagaattcccagtaacttccttgtgttgtgtacattcaactcacagagttgaacgttcccttagacagagcagatttgaaacactctttttgtgcaattggcaagtggagatttcaagcgctttaaggtcaatggcagaaaaggaaatatcttcgtttcaaaactagacagaatcattcccacaaactgcgttgtgatgtgttcgttcaactcacagagtttaacctttctgttcatagagcagttaggaaacactctgtttgtaaagtctgtaagtggatattctgacatcttgtgcccttcgttggaaacgggatttcttcctattctggtagacagaagaattctcagtaacttccttgtgttgtgtgcattcaactcacagagttgaacgatcctgtacacagagcagacttgaaacactctttttgtggaatttgcaagtggagatttcagccgctttgaggtcaatggtagaaaagggaatatcttcgtatagaaactagacagaatgattctcagaaacttcttggtgatgtgtgcgttcaactcacagagtttaacctttcttttcatagagcagttaggaaacactctgtttgtaaactctgcaagtggatattcagacctgtttgaggccttcgttggaaacgggatttcttcatactatgctagacagaaaaattcccagtaacttccttgtgttgtgtgtgttcaactcacagagttgaactttcatttacacagagcagatttgaaacactctttttgtggaatttgcaagtggagatttcaagcgctttgaggccaaaggcagaaaaggaaatatcttcgtttcaaaactagacagaatcattctcagaaactgctctgcgatgtgtgcgttcaactctcagagtttaacttttcttttcattcagcagtttggaaacactctgtttgtaaagtctgcacgtggatattttgaccacttagaggccttcgttgcaaacgggtttttttcctgtaaggctagacagaagaattcccagtaacttccttgtgttgtgtgcattcaactcacagagttgaacgttcccttagacagagcagatttgaaacactctatttgtgcaatttgaaagtgtagatttcaagcgctttaaggtcaacggcagaaaaggaaatatcttcgtttcaaaactagacagaatcattcccacaaactgcgttgtgatgtgttcgtttaactcacggagtttaacctttctgttcatagagcagttaggaaacactctgtttgtaaattctgcaagtggatattcagacctctttgaggccttcgttggaaacgggatttcttcatattatgctagacagaagaattctcagtaacttccttgtgttgtgtgtattcaactcacagagttgaatgatcctttacacagaacagtcttgaaacactctttttgtggaatttgcaagtggagatttcagccgctttgaggtctatggtagaataggaaatatcttcctatagaaactagacagaatgattctcagaaactcctttgtgatgtgtgcgttcaactcacagagtttaacctttcttttcatagagcagttaggaaacactctgtttgtaaagtctacaagtggatattcagacatctttgaggctttcgttggaaacgggatttcttcatattctgctagacagaagaattctcagtaacttcttgtgttgtgtgtattcaactgacagagttgaactttcatttagacagatcagatttgaaacactgttttcgtggaatttgcaagtggaggtttcaagcgctttgaagccaaaggcagaaaaggaaatatcttcctataaaaaccagacagaaacattctcaaaaactgctctgtgatgtgtgcgttcaactctcagagtttaattttcttttcattcagcagtttgtaaacactctgtttgtaaagtctgcacgtggatattttgaccacttagaggccttcgttggaaacgagtttttttcatgtaaggctagacagaagaattcccagtaacttccttgtgttgtgttcattcaactcacagagttgaacgttcccttagacagagtagatttgaaacactctttttgtgcaattggcaagtggagatttcaagcgctttaaggtcaatggcagaaaaggaaatatcttcgtttcaaaactagacagaatgattctcagaaacttcattgtgacgtgtgcgttcaactcacagagtttaacctttcttttcatagagcagttaggaaacagtctgtttgtcaattctgtaagtggatattctgacatcttctggccttcgttggaaacgggatttcttcatattctgctagacagaagaattctcagaaacttccttgtgttgtgtgttttcaactcacagagttgaacgatcctttacacagagcagacttgaaacactccttttgtggaatttgcaagtggagatttcagccgctttgaggtcaatggtagaataggaaatatcttcctataaaaactagacagaatgattctcagaaacttcattgtgatgtgtgcgttcaactcacagactttaacctttcttttcatagagcagttaggaaacactctgtttgtaaagtctgcaagtggatattcagacctctttgaggccttcgttggaaactggtttttttcatgtaaggctagacagaagaattcccagtaacttccttgtgttgtgtgtgttcaactcacagagttgaactttcatttacacagagcagatttgaaacactctttttgtggaatttgcaaatggagatttcaagcgctttgaggccaaaggcagaaaaggaaacatcttcgtataaaaactacacagaatcattctcagaaactgctctgcgatgtgtgcgttcaactctcagagtttaactttgcttttcattcagcagtttggaaacactctgtttgtaaagtctgcacgtggataatttgaccacttagaggccttcgttggaaacgggtttttttcatgtaaggctagacagaagaattcccagtaacttcattgtgttgtgtgcattcaactcacagagttgaacgttcccttagacagagcagatttgaaacactctatttgtgcaatttgcaagtgtagatttcaagcgctttatggtcaacggcagaaaaggaaatatcttcgtttcaaaactagacagaatcattcccacaaactgcgtagtgatgtgttcgttcaactcacagagtttaacctttctgttcatagagcagttaggaaacactctgtttgtaaagtctgtaagtggatattctgacatcttgtggccttcgttggaaacgggatttcttcatattctgctagacagaagaattctcagaaacttccttgtgttgtgtgtattcaactcacagagttgaacgatcctttacagagagcagacttgaaacactctttttgtggaatttgcaagtggagatttcagccgctttgaggtcaaaggtagaataggaaatatcttcctacagaaactagacagaatgattctcagaaactcctttgtgatgtgtgcgttcaactcacagagtttaccctttcttttcatagagcagttaggaaacactctgtttgtaaagtctgcaagtggatattcagacgtccttgaggctttcgttggaaacgggatttcttcatattctgctagaaagaagaattcccagtaacttccttgtgatgtgtgtgttcaactcacagagttgaactttcatttacacagagcagatttgaaacactctttttgtggaatttgcaagtggagatttcaagcgctttgaggccaaaggcagaaaaggaaatatcttcgtataaaaactacacagaaatcattctcagtaaactgctgcgtgatgtgtgcgttcaactctcagagtttaacttttcttttcattcagcagtttggaaacactctgtttgtaaagtctgcacgtggaaattttgaccacttagaggccttcgttggaaacgggtttttttcatgtaaggctagacagaagaattcccagtaacttccttgtgttgtgtacattcaactcacagagttgaacgttcccttagacagagcagatttgaaacactctttttgtgcaattggcaagtggtgatttcagccgctttgaggtcaatggtataaaaggaaatatcttcgtattaaaactagacagaatcattctcagaaactgctctgcgatgtgtgcgttcaactctcacagtttaacttttcttttcattcagcagtttggaaacactctgtttgtaaagtctgcacgtggataatttgaccacttagaggccttcgttggaaacgggtttttttcatgtaaggctggacagaagaattctcagtaacttccttttgttgtgtgtattcaactcacagagttgaacgatcctttacacagagcagacttgtaacactctttttgtggaatttgcaagtggagatttcagccgctttgaagtcaaaggtagaaaaggaaatatcttcctataaaaactagacagaatgattctcagaaacttctttgtgatgtgtacgttcaactcacagagtttaacctttcttttcatagagcagttaggaaacactctgtttgtaaactctgcaagtggatattcagacctctttgaggccttcgttggaaacgggatttcttcatactatgctagacagaagaattctcagtaacttccttgtgttgtgtgtattcaactcacagagttgaacgatcctttacacagagcagtcttgaaacactctttttgtggaatttgcaagtggagatttcagccgctttgaggtcaatagtagaaaaggaaatatcgtcgtagaaaaactagacagaaatcattctcagaaactgctctgcgatgtgtgcgttcaactctcagcgtttaacttttcttttcattcagaagtttggaaacactctgtttgtaaagtctgcacgtggataacttgaccacttagaggccttcgttggaaacgggtttttttcatgtaaggctagacagaagaattcccaggaacttccttgtgttgtgtacattcaactcacagagttcaacgttcccttagacagagcagatttgaaacactctttttgtgcaattggcaagtggtgatttcagcctctttgaggtcaatggtagaaaaggaaatatcttcgtataaaaactagacagaatgattctcagaaacttctttgtgaagtgtgcgttcaactcacagtgtttaacctttcttttcatagagcagttaggaaacactctgtttgtaaactctgcaagtggatattcagacctctttgaggccttcgttggaaacgggatttcttcatactgtgctagacagaagaattctcagtagcttcattgtgttgtgtgtattcaactcacagatttcaacgatcctttacacagagcagacttgaaaccctctttttctggaatttgcaagtgtagatttcagccgctttgaggtcaatggtagaataggaaatatcttcctatagaaactagacagaatgattctcagaaactcctttgagatgtgtgtgttcaactcacagagtttaacctttcttttcatagagcagttaggaatcactctgtttgtaaagtctgcaagtggatattcagacctctttgaggccttcgttggaaacgggttttttcatataaggctagacagaagaattctcagtaacttccttgtgttgtgtgtattcaactcacagagttgaacgatcctttacacagagcagatttgtaacactctttttgtggaatttgcaagtggagatttcaagcgctttgaggccaaaggcagaaaaggaaatatcttcgtttcaaaactagacagaatcattctcagaaactgctctgtgatgtgtgcgttcaactctcagagtttaacttttcttttcattcagcagtttggaaacactctgtttgtaaagtctgcacgtggataatttgaccacttagaggcattcgttggaaacgggtttttttcatgtaacgctagacagaagaattcccagtaacttccttgtgttttgtgcattcaactcacagagttgaacgttcccttagacagagcagatttgaaacactctatttgtgcaatttgcaagtgtagatttcaagcgctttaaggtcaatggcagaaaaggaaatatcttcgtttcaaaactagacagaatgattctcagaaactcctttgtgatgtgtgcgttcaactcacagagtttaacctttcttttaatagagcaattaggaaacactctgtttctaaagtctgcaagtggatattcagacctcttagcggccttcgttggaaacgagatttcttcatattttgctagacaaaagaattctcagtaacttccttgtgttgtgtgcattcaactcacagagttgaacgatcctttacacagagcagattggaaacactctttttgtggaattgcaagaggagatttcagctgctttgaggtcaatggtagaaaaggaaatatcttcgtatgaaaactagacagaatgattctcataaactcctttgtgatgtgtgcgttcaactcacagagtttaacctttcttttcatagagcagttaggaaacactctgtttgtaaagtctgcaattggatattcagacccctttgaggcctttgttggaaacgggatttcttcatattatgctagacagaagaattctcagtaacttccttgtgttgtgtgtattcaactgacagagttgaactttcatttagagagagcagatttgtaacactgtttttgtggaatgtgcaagtggagatttcaagcgctttggggccaaaggcagaaaaggaaatatcttcgtataaaaactagacagaatcattctcagaaactgctctgcgatgtgtgcgttcaactctcagagtttaacttttcttttcattcagaagtttggaaacactgtgtttgtaaagtctgcacgtggataacttgaccacttagaggccttcgttggaaacgggtttttttcatgtaaggctagacagaagaattcccagtaacttccttgtgttgtgtgcattcaactcacagagttgaacgttcccttagacagagcagatttgaaacactctatttgtgcaatttgcaagtgtagatttcaagcgctttaaggtcaatgacagaaaaggaaatatcttcgtttcaaaactagacagaatcattcccacaaactgcgttgtgatgtgttcgttcaactcacagagtttaacctttctgttcatagagcagttaggaaacactctgtttgtaatgtctgtaagtggataatctgacatcttgtggccttcgttggaaacgggatttcttcatattctgctagacagaagaattctcagtaacttccttgtgttgtgtgtattcaaatcacagagttgcacgatcctttacacagagcagacttgaaacactctttttgtggaatttgcaagtggagatttcagccgctttgaggtcaatggtagaataggaaatatcttcctatagaaactagacagaatgattctcagaaactcctttgtgatgtgtgtgttcaactcacagagtttaacctttcttttcatagagcagttagtaaacactctgtttatgaagtctgcaagtggatattcagacccctttgaggccttcgttggaaacgggatttacttcatattctgctagacagaagaattcccagtaacttccttgtgttgtgtgtgttcaactcacagagttgaactttcatttacacagagcagatttgaaacactctttttgtggaatttgcaaatggagatttcaagcgctttgattccaaaggcagaaaaggaaatatcttcgtttcaaaactagacagaatcattctcagaaactgctctgcgatgtgtgccttcaactctcagagtttaacttttcttttcattcagcagtttggaaacactctgtttgtaaagtctgcacgtggatattttgaccacttagaggccttcgttggaaatgggtttttttcctgtaaggctagacagaagaattcccagtaacttccttgtgttgtgtacattcaactcacagagttgaacgttcccttagacagagcagatttgaaacactctttttgtgcaattggcaattggagatttcaagcgctttaaggtcaatggcagaaaaggaaatatcttcgtttcaaaactagacagaatcattcccaaaaactgcgttgtgatgtgttcgttcatctcacagagtttaacctttcttttcatagagcagttaggaaacagtctgtttgtaaattctgtaagtggatattctgacatcttgtggccttcgttggaaacgggatttcttcatattctgctagacagaagaattctcagtaactcccttgtgttgtgtgtattcaactcacagagttgaacgatcctttacacagagcagacttgaaacactctttttgtggaatttgcaagtggagatttcagccgctttgaggtcaatagtagaaaaggaaatatcttcgtagaaaaactagacagaatgattctcataaactcctttgtgatgtgtgcgttcaactcacagagtttaacctttcttttcatagagcagttaggaaacactctgtttgtaaagtctgcaagtggatattcagacctccttgaggccttcgttggaaacgggatttcttcatattatgctagacagaagaattctcagtaacttcccttgtgttgtgtgtattcaactgacagagttgaactttcatttagagagagcagatttgaaacactgtttttgtggaatttgcaattggagatttcaagcgctttggggccaaaggcagaaaaggaaatatcttcgtataaaaactagacagaatcattctcagaaactgctgcgtgatgtgtgcgttcaaccctcagagtttaacttttcttttcattcagcggtttggaaacactctgtttgtatagtctgcacgtggatattttgaccacttagaggccttcgttggaaacgggattttttcatgtaaggctagacagaagaattcctagtaacttccttgtgttgtgtacattcaactcacagagttgaacgttcccttagacagagcagatttgaaacactctttttgtgcaattggcaaatggagatttcaagcgctttaaggtcaatggcagaaaaggaaatatcttcgtttcaaaactagacagaatgattctcagaaactcctttgtgatgtgtgcgttcaactcacagagtttaacttttcttttcatagagcagttagcaaacactctgtttgtaaagtctgcaagtggatattcagacctctttgaggccttcgttggaatcgggatttcttcaaattctgctaggcagaagaattctcagtaacttccttgtgttgtgtgtattcaactcacagagttgaacgatcctttacacagagcagacttgatacactcttcttatggaatttgaaagtgtagatttcagccgctttgaggtcaatggtagaataggaaatatcttcctatggaaactagacagaatgattctcagaaactcctttgtgatgtgtgcgttcaactcatagagtttaacctttcttttcatagagcagttaggaaacactctgtttgtaaagtctgcaagtggatattcagacctctttgaggccttcgttggaaacgggtttttttcatataaggctagacagaagaattctcagtaacttccttgtgttttgtgtattcaactgacagagttgaagtttcatttagagagagcagatttgaaacactgtttttgtggaatttgcaagtggagatttcaagcgctttgggaccaaaggcagaaaaggaaatatcttcgtataaaaactagacagaatcattctcagaaactgctctgcgatgtgtgcgttcaactctcagagtttaacttttcttttcattcagcagtttggaaacactctgtttgtaaagtctgcacctggatattttgaccacttagaggccttctttggaaacgggtttttttcatgtaaggctagacagaagaattcccagtaacttccttgtgttgtgtgcattcaactcacagagttgaatgttcctttagacagagcagatttgaaacactctttttgtgcaatttgcaagtggagatttcaagcgctttaaggtcaatggcagaaaatgaaatatcttcgtttcaaaactacacagaatcattcccacaaactgcgttgtgatgtgttcgttcaactcacagagtttaacctttcttttcatagagcagttaggaaacagtctgtttgtaaattctgtaagtggatattctgacatcttgtggccttcgttggaaacgggatttcttcatactgtgctagacagaagaattctcagtaacttctttgtgttgtgtgtattcaactcacagagttgaacgatcctttacacagagcagacttgaaacactctatttgtggaatttgcaagtggagatttcagccgctttgaggtcaatggtagaataggaaatatcttcctatagaaactagacagaatgatcctcagaaactcctttgtgatgtgtgcgttcaactcacagagtttaacctttcttttcatagagcagttaggaaacactctgtttgtaaagtctgcaagtggatattcagacctccttgaggccttcgttggaaacgggatttcttcatattatgctagacagaagaattctcagtaacttccttgtgttgtgtgtattcaactgacagagttgaactttcatttagagagagcagatttgaaacactgtttttgtggaatttgcaagtggagatttcaagcgcttcggggccaaaggcagaaaaggaaatatcttcgtataaaaactagacagaatcattctcagaaactgctctgcgatgtgtgcgttcaactctcagagtttaacttttcttttcattcagcagtttggaaacactctgtttgtaaagtctgcacgtggataatttgaccacttagaggccttctttggaaacgggtttttttcatataaggctagacagaagaattcccagtaacttccttgtgttgtgtgcattcaactcacagagttgaacgttcccttagacagagcagatttgaaacactctatttgtgcaatttgcaagtgtagatttcaagcgctttaaggtcaacggcagaaaaggaaatatcttcgtttcaaaactagacagaatcattcccacaaactgcgttgtgatgtgttcgttcaactcacagagtttaacctttctgttcatagagcagttaggaaacactctgtttgtaaagtctgtaagtggatattctgacatcttgtggccttcgttggaaacgggatttcttcatattcttctagacagaagaattctcagtaacttccttgtgttgtgtgtattcaactcacagagttgaacgatcctttacacagagcagactagtaacactctttttgtggaatttgcaagtggagatttcagccgctttgaagtcaaaggtagaaaaggaaatatcttcctataaaaactagacagaatgattctgagaaactcctttgtgctgtgtgcattcaactcacagagtttaacctttcttttcatagagcagttaggaaacactctgcttgtaaagtctgcaagtggatactcagacctccttgaggccttcgttggaaacgggatttcttcctattatgctagacagaaggattcccagtaacttccttgtgttgtgtgtgttcaactcacagagttgaactttcatttacaaagagcagatttgaaacactctttttgtggaatttgccagtggagatttcaagcgctttgaggccaaaggcagaaaaggaaatatcttcgtataaaaactagacagaatcattctcagaaactgctctgcaatgtgtgcgttcaactctcagagtttaacttttcttttcattcagcagtttgtaaacactctgtttgtaaagtctgcacgtcgatgttttgaccacttagaggccttcgttggaaacgggtttttttcctgtaacgctagacagaagaattcccagtaacttccttgtgttgtgtacattcaactcacagagttgaacgttcccttagacagagcagatttgaaacactctttttgtgcaattggcaagtggtgatttcagccgctttgaggtcaatggtagaaaaggaaatatcttcgtataaaaactagacagaatcattcccacaaactgcgttgtgatgtgttcgttcaactcacagggtttaacctttctgttcatagagcagttaggaaacactctgtttgtaaagtctgtaagtggatattctgacatacttgtggccatcgttggaaacgggatttcttcatattctgctagacagaagaattctcagtaacttccttgtgttgtgtgtattctactcacagagttgaacgatcctttacacacagcagacttgaaacactctttttgtggaaattgcaagtggagatttcagccgctttgaggtcaatggtagaataggaaatatcttcctatagaaactagacagaatgattctcagaaactcctttgtgatgtgtgtgttcaactcacagagtttcacctttcttttcatagagcagttaggaaacactctgtttgtaaagtctgcaagtggatattcagacctccttgaggacttcgttggaaacgggatttcttcatattctgctagacagaagaattctcagtaacttccttgtgttgtgtttattgaactgacagagttgaactttcatttagagagagcagatttgaaacactgtttttgtggaatttgcaagtggagatttcaagcgctttggggccaaaggcagaaaacgaaatatcttcgtataaaaactagacagaatcattctcagaaactgctgcgtgatgtgtgcgttcaactctcagagtttaacttttcttttcattcagcggtttggaaacactctgtttgtaaagtctgcacgtggatattttgaccacttagaggccttcgttggaaacgggtttttttcatgtaaggctagacagaagaattcccagtaacttccttgtgttgtgtacattcaactcacagagttgaacgttcccttagacagagcagatttgaaacactctttttgtgcaattggcaagtggagatttcaagcgctttaaggtcaatggcagaaagggaaatatcttcgtttcaaaactagacagaatcattcccacaaactgcgttgtgatgtgttcgttcaactcacagagtttaacctttcttttcatagagcagttaggaaacactctgttggtaaattctgtaggtggatattctgacatcttgtggccttcgttggaaacgggatttcttcatattctgctagacagaagaattctcagaatcttccttgtgttgtgtgtattcaactcacagagttgaacgatcctttacacagagcagacttgaaacactctttttgtggaatttgcaagtggacatttcagccgctttgaggtccatggtagaaaaggaaatatcttcgtacaaaaactagacagaatgattctcagaatcttctttgtgatgtgtgcgttcaactcacagagtttaacctttcttttcatagagcagttaggaaacactctgtttgtaaattctgcaagtggatattcagacctcattgaggccttcgttgaaaacgggatttcttcatactatgctagacagaagaattcccagtaacttccttgtgttgtgtgtgttcaactcacagagttgaactttcatttacacagagcagatttgaaacactctttttgtggaatttgcaaatggagatttcaagcgctttgagaccaaaggcagaaaaggaaatatcttcgtataaaaactagacagaatcattctcagaaactgctgcgtgatgtgtgcgttcaactctcagagtttaacttttcttttcattcagcagtttggaaacactctgtttgtaaagtctgcacgtggaaattttgaccacttagaggccttcgttggaaacgggtttttttcatgtaaggctagacagaagaattcccagtaacttccttgtgttgtgtacattcaactcacagagttgaacgttcccttagacagagcagatttgaaacactctttttgtgcaattggaaagtggagattttaagcgctttaaggtcaatggcagaaaaggaaatatctccgtttcaaaactagacagaatcattcccacaaactgcgttgtcatgtgttcgttcaactcacagagtttaacctttcttttcatagagcagttaagaaacagtctgtttgtaaattctgtaagtggatattctgacatcttgtggccttcgttggaaacgggatttcttcatattctgctagacagaataattctcagtaacttccttgtgttgtgtgtattcaactcacagagttgaacgatcctttacagagagcagacttgaaaaactctttttgtggaatttgcaagtggagatttcagccgctttgaggtcaatggtagaaaaggaaatatcttcgtataaagaatagacagaatgattctcagaaacttcattgtgatgtgtgcgttcaactcacagagtttaacctttcttttcatagagcagttaggaaacactctgtttgtaaactctgcaagtggatattcacacccctttgaggccttcgttggaaacgggatttcttcatactgtgctagacagtagaattctcagtaacttccttgtgttgtgtgtattcaactcacagagttgaacgatcctttacacagagcggacttgaaacactctttttgtggaatttgcaagtggagatttcagccgctttgaggtcaatggtagaaaaggaaatatcttcgtataaaaactagacagaatcattctcagaaactgctctgcgatgtgtgcgttcaactctcagagtttaacttttcttttcattcagcagtttggaaacactctgtttgtaaagtctgcacgtggatattttgaccacttagaggcctttgttggaaacgggtttttttcctgtaaggctagacagaagaattcccagtaacttccttgcgttgtgtacattcaactcacagagttgaacgttcccttagacagagcagatttgaaacactctttttgtgcaattggcaagtggagatttcaagcgctttaaggtcaatggcagaaaaggaaatatcttcgtttcaaaactagacagaatcattcccacaaactgcgttgtgatgtgttcgttcaactcacagagtttaacctttctgttcatagagcagttaggaaacactgtgtaaagtctgttagtggatattctgacatccttgtggccttcgttggaaacgggatttcttcatattctgctagacagaataattctcagtaactcccttgtgttgtgtgtattcaactcacagagttgaacgatcctttacacagagcagacttgaaacacacttttggtggaatttgcaagtggagatttcagccgctttgaggtcaatggtagaaaaggaaatatcttcgtataaagactagacagaatgattctcagaaactcctttgtgatgtgtgtgttcaactcacagagtttaacctttcttttcatagagcagttaggaaacactctgtttgtaaagtctgcaagtggatattcagacctctttgaagccttcgttggaaacgggtttttttcatataaggttagacagaagaattctcagtaacttccttgtgttgtgtgtattcaactgacagagttgaactttcagttggagagagcagatttgaaacactgtttttgtggaatttgcaagtggagatttcaagcgctttggggccaaaggcagaaaaggaaatatcttcgtataaaaactagacagaatcattctcagaaactgctgcgtgatgtgtgcgttcaactctcagagtttaacttttcttttcattcagcggtttcgaaacactctgtttgtaaagtctgcacgtggatattttgaccacttagaggccttcgttggaaacgggttttttgcatgtaaggctagacagaagaattctcagtaacttccgtgtgttgtgtgtattcaactcaaagagttgaacgatcctttacacagagcagacttgtaacactctttttgtggaatttgcaagtggtgatttcagccgctttgaagtcaaaggtagaaaatgaaatatcttcctataaaaactagacagaatcattcccacaaactgcgttgtgatgtgttcgttcaactcacagagtttaacctttcttttcatagagcacttaggaaacagtctgtttgtaaattctgtaagtggatattctgacatcttgtggccttcgttggaaacgggatttcttcatattctgctagacagaagaattctcagaaacttccttgtgttgtgtgttttcaactcacagagttgaacgatcctttacacagagcagacttgaaacactctttttgtggaatttgcaagtggagacttcagccgcttttaggtcaatggtagaataggaaatatcttcctataaaaactagacagaatgattctcagaaactcctttgtgatgtgtgcgttcaactcacagagtttaacctttcttttcatagagcagttaggaaacactctgtttgtaaagtctgcaagtggatattcagacctctttgaggccttcgttggaaacgggttttttacaagataaggcttgacagaagaattcccagtaacttccttgtgttgtgtgtgttcaactcacagagttgaactttcatttacacagagcagatttgaaacactctttttttggaatttgcaagtggagatttcaagcgctttgaggccaaaggcagaaaaggaaatgtcttcgtttcaaaactagacagaatcattctcagaaactgctctgcgatgtgtgcgttcaactctcagagtttaacttttcttttcattcagcagtttggaaacactctgtttataacgtctgcacgtggataacttgaccacttagaggacttcgttggaaacggttttttttcctgtaaggctagacagaagaattcccagtaacttccttgcgttgtgtacattcaactcacagagttgaacgttcccttagacagagcagatttgaaacactctttttgtgcaattggcaagtggagatttcaagcgctttaaggtcaatggcagaaaaggaaatatcttcgtttcaaaactagacagaatgattctcatgaactcctttgtgatgtgtgcgttcaactcacagagtttaacctttcttttcatagagcagttaggaaacactctgtttgtaaagtctgcaagtggatattcagacctccttttggccttcgttggaaacgggatttcttcatattctgctagacagaagaattctcagtaacttccttgtgttgtgtttattcaactcacagagttgaatgatcctttacacagagcagacttgaaacacactttttgtggaaattgcaagtggagatttcagccgctttgaggtcaatggtagaaaagtaaatatcttcgtataaagactagacagaatgattctcagaaactcctttgttatgtgtgcgttcaactcacagagtttaacctttcttttcatagagcagttaggaaacactctgtttgtaaagtctgcaagtggatattcagacctctttgaggccttcgttggaaacgggtttttttcatataagtctagacagaagaattcccagtaacttccttgtgttgtgtgtgttcaactcacacagttgaactttcatttacacagagcagatttgaaacactctttttgtggaatttgaaaatggagatttcaagcgctttgaggccaaaggcagaaaaggaaatatgttcgtataaaaactagacagaatcattctcagaaactgctctgcgatgtgtgcgttcaactctcagagtttaacttttcttttcattcagcagtttggaaacactctgtttgtaacgtctgcacgtgaataatttgaccacttagaggccttcgttggaaacgggtttttttcatgtaaggctagacagaagaattcccagtaacttccttgtgttgtgtgcattcaactcacagagttgaacgttcccttagacagagcagatttgaaacactctatttgtgcaatttgcaagtgtagatttcaagcgctttaaggtcaatggcagaaaaggaaatatcttcgtttcaaaactagacagaatgattctcataaactcctttgtgatgtgtgcattcaactcacagagtttcacctttcttttcatagagcagttagaaaaaactctgtttgtaaagtctgcaagtggatattcagacctccttgaggccttcgttggaaacgggatttcttcatattatgctagacagaacaattctcagtaacttccttgtgttgcgtgtattcaactcacagagttgaacgatcctttacacagagcagacttgaaacactctttttgtggaatttgcaagtggagatttcatccgctttgaggtcaatggtggaaaaggaaatatcttcgtataaagactagacagaatgattctcagaaactcctttgtgatgtgtgtgttcaactcacagagtttaacctttcttttcatagagcagttcgtaaacactctgtttataaagtctgcaagtggatattcagacccctttgaggccttctttggaaacgggatttcttcatattatgctagacagaagaattcccagtaacttccttgtgttgtgtgtgttcaactcacacagttgaactttcatttacactgagcagatttgaaacactctttttgtggaatttgcaaatggagatttcaagcgctttgaggccaaaggcagaaaaggaaatatcttcgtataaaaactagacagaatcattctcagaaactgctctgcgatgtgtgcgttcaactctcagagtttaacttttcttctcattcagcagtttggaaacactctgtttgtaaagtctgcacgtggataatttgaccacttagaggccttcgttggaaacgggtttttttcatgtaaggctagacagaagaattcccagtaacttccttgtgttgtgtgcattcaactcacagagttgaacgttcccttagacagagcagatttgaaacactctatttgtgcaatttgcaagtgtagatttcaagcgctttaaggtcaacggcagaaaaggaaatatcttcgtttcaaaactaaacagaatcattcccacaaactgcgttgtgatgtgttcgttcaactcacagagtttaacctttctgttcatagcgcagttaggaaacactctgtttgtaaagtctgtaagtggatattctgacattttgtggccttcgttggaaatgggatttcttcatattctcctagacagaagaattctcagtaacttccttgtgttgtgtgtattcaactcacagatttgaacgatcctttacacagagcagacttgaaacgctctttttgtggaatttgcaagtggagatttcacccgcgttgaagtcaatggtagaaaaggaaatatcttcgtataaaaactagacagaatgattctcagaaactcctttgtgatgtgtgcgttcaactcacagagtttaacctttcttttcatagagcagttgggaaacactctgtttgtaaagtttgcaagtggatattcagacatccttgaggctttcgttggaaacgggatttcttcatattctgctagaaggaagaattcccagtaacttcccttgtgttgtgtgtgttcaactcacagagttgaactttcatttacacagagcagatttgaaactctctttttgtggaatttgcaaatggagatttcaagcgctttgaggtcaaaggcagaaaaggaaatatcttcgtataaaaactagacagaatcattctcagaaactgctctgcgatgtgtgcgttcaactctcagagtttaacttttcttttcattcagcagtttggaaacactctgtttgtaaagtctgcacgtggatattttgaccacttagaggccttcattggaaacgggtttttttcctgtaaggctagacagaagaattcccagtaacttccttgtgttgtgtgcattcaactcacagagttgaacgttcccttagacagagcagatttgaaacactctatttgtgcaatttgcaagtgtagatttcaagcgctttaaggtcaagggcagaaaaggaaatatcttcgtttcaaaactagacagaatcattcccacaaactgcgttgtgatgggttcgttcaactcacagagtttaacctttctgttcatagagcagttaggaaacactctgtttgtaaagtctgtaagtggatattctgacatcttgtggccttcgttggaaacgggattacttcatattctgctagacagaagaattctcagtaacttccttgtgttgtgtttattcaactcacagagttgaatgatcctttacacagagcagacttgaaacactctttttgtggaatttgtaagtggagatttcagccgctttgaggtcaatagtagaaaaggaaatatcttcgtagaaaaactacacagaatgattctcagaaactcctttgtgatgtgtgttttcaactcacagagtttaaccttccttttcatagagcagttagtaaacactctgtttataaagtctgcaagtggatattcagacccctttgaggccttcgttggaaacgggatttattcatattctgctacacagaagaattctcagtaacttccttgtgttgtgtgtattcaactgacagagttgaactttcatttagagacagcagatttgaaacactgtttttgtggaatttgcaagtggagatttcaagcgcttttgggccaaaggcagaaaaggaaatatcttcgtataaaaactagacagaatcattctcagaaactgctctgcgatgtgtgcgttcaactctcacagtttaacttttcttttcattcagcagtttggaaacactctgtttgtaaagtctgcacgtggataatttgaccacttagaggccttcattggaaacgggtttttttcatgtaaggctagacagaagaattcccagtaacttccttgtgttgtgtgcattcaactcacagagttgaacgttcccttagacagagcagatttgaaacactctatttgtccaatttgcaagtgtagatttcaagcgctttaaggtcaacggcagaaaaggaaatatcttcgtttcaaaactagacagaatcattcccacaaactgcgttgtgatgtgttcgttcaactcacagagtttaacctttcttttcatagagcagttaggaaacactctgtttgtaaagtctctaagtggatattctgacatcttgtggccttcgttggaaacgggatttcttcatattatgctatacagaagaattctcagtaacttccttgcgttgtgtgtattcaactcacagagttgaacgatcctttacacagagcagacttgaaacattctttttgtggaatttgcaagtggagatttcagccgctttgaggtcaatggtagaataggaaatatcttcctatagaaactagacagaacgattctcagaaactccattgtgatgtgtgcgttcaactcacagagtttaacctttcttttcatagagcagttaggaaacactctgtttgtaaagtctgcaagtggatattcagacctctttgaggccttcgttggaaacgggatttcttcctattctgctagacagaagaattcccagtaacttccttgtgctgtgtgtgttcaactcacagagttgaactttcatttacacagagcagatttgaaacactctttttgtggaatttgcaaatggagatttcaagcgctttgaggccaaaggcagaaaaggaaatatcttcgtttcaaaactagacagaatgattctcagaaactgctctgcgatgtgtgcgttcacctctcagagtttaacttttcttttcattcagcagtttggaaaccctctgtttgtaaagtctgcacgtgcataatttgaccacttagaggccttcgttggaaacgggtttttttcatgtaaggctagacagaagaattcccagtaacttccttgtgttgtgtacattcaattcacagagttgaacgttcccttagacagagcagatttgaaacactctttttgtgcaattggcaaatggagatttcaagcgctttaaggtcaatggcagaaaaggaaatatcttcgtttcaaaactagacagaatcattcccacaaactgcgttgtgaagtgttcgttcaactcacagagtttaacctttcttttcatagagcagttaggaaacactctgtttgtaaattctgtaagtggatattctgacatcttggggccttcgttggaaacgggatttcttcatattctgctagacagaagaattctcagtaacttccttgtgttgtgtgtattcaactcacagagttgaatgatcctttacacagtagcagacttgaaacactctttttgtggaatttgcaagtggagatttcagccgctttgaagtcaaaggtagaaaaggaaatatcttcctataaaaactagacagaatgattctcagaaactcctttgtgatgtgtgcgttcaactcacagagtttaacctttcttttcatagagcagttaggaaacactctgtttgtaaagtctgcaagtggatattcagacctctttgaggccttcgttggaaacggtatttcttcatattatgctagacagaaggattcccagtaacttccttgtgttgtgtgtgttcaactcacagagttgaactttcatatacaaagagcagatttgaaacactctttttgtggaatttgcaagtggagatttcaagcgctttgaggccaaaggcagaaaaggaaatatcttcgtataaaaactagacagaatcattctcagaaactgctctgcgatgtgtgcgttcaactctcagagtttaacttttcttttcattcagcagtttgtaaactctctgtttgtaaagtctgcacgtggatattttgaccacttagaggccttcgttggaaacgggtttttttcctgtaaggctagacagaagaattcccagtaacttccttgtgttgtgtacattcaactcacagagttgaacgttaacttagacagagcagatttgaaacactctttttgtgaaattggcaagtggagatttcaagagttttaaggtcaatggcagaaaaggaaatatcttcgtttcaaaactagacagaatcattcccacaaactgcgttgtgatgtgttcgttcaactcacagagtttaacctttctgttcatagagcagttaggaaacactctgtttgtaaagtctgtaagtggatattcagacatcttgtggccttcgttggaaacgggatttcttcatattctgctagacagaagaattctcaataacttccttgtgttgtgtttattcaactcacagagttgaatgatcctttacacagagcagacttgaaacacactttttgtggaaattgcaaatggagatttcagccgctttgaggtcaatggtagaaaagtaaatatcttcgtataaagactagacagaatgattctcagaaactcctttgtgatgtgtgcgttcaactcacagagtttaacctttgttttcatagagcagttaggaaacactctgtttgtaaagtctgcaagtggatattcagacctctttgaggccttcgttggaaacgggtttttttcatataaggctagacagaagaattctcagtaacttccttgtgttgtgtgtattcaactgacagagttgaactttcatttagagagagcagatttgaaacactgtttttgtggaatttgcaaatggagatttcaagagctttggggccaaaggcagaaaaggaaatatcttcgtataaacactagacagaatcattctcagaaactgctgcgtgatgtgtgcgttcaactctcagagtttaacttttcttttcattcagcggtttggaaacactctgtttgaaaagtctgcacgtggatattttgaccacttagaggccttcgttggaaacgggtttttttcatgtaaggctagacagaagaattcccagtaacttccttgtgttgtgtgcattcaactcacagagttgaacgttcccttagacagagcaggtttgaaacactctatttgtgcaatttgcaagtgtagatttcaagcgctttaaggtcaatggcagaaaaggaaatatcttcgtttcaaaactagacagaatcattcccacaaactgcgttgtgatgtgttcgttcaactcacagagtttaacctttctgttcatagagcagttaggaaacactctgtttgtaaagtctgtaagtggatattctgacatcttgtggccttcgttggaaacgggatttcttcgtattctgctagacagaagaattctcagtaacttccttgtgttgtgtgtattcaactcacagagttgaacgatcctttacacagagcagacttgaaacactctttttgtggaatttgcaagtggagatttcagccgctttgaggtcaatggtagaaaagtaaatatcttcgtataaagactagacagaatgattctcagatactcctttgtgatgtgtgcattcaactcacagagtttaacctttcttttcatagagcagttaggaaacactctgtttgtaaagtctgcaagtggatattcagacctccttgtggccttcgttggaaacgggatttcttcatattatgctagacagaagaattcccagtaacttccttgtgttgtgtgtgttcaactcacagagttgaactttcatttacacagagaagatttgaaacactctttttgtggaatttgcaagtggagatttcaagcgctttgaggccaaaggcagaaaaggaaatatcttcgtttcaaaactagacagaatcattctcagaaactgctctgcgatgtgtgcgttcaactctcagagtttgacttttcttttcattcagcagtttggaaacactctgtttgtaaagtctgcacgtggatattttgaccacttagaggccttcgttggaaacgggtttttttcctgtaaggctagacagaagaattcccagtaacttccttgtgttgtgtgcattcaactcacagagttgaacgttcccttagacagagcagatttgaaacactctatttgtgcaatttgcaagtgtagatttcaagcgctttaaggtcaacggcagaaaaggaaatatcttcgtttcaaaactagacagaattattctgagaaactcctttgtgatgtgtgcgttcaactcacagagtttaacctttcttttcatagagcagttaggaaacactctgtttgtaaagtctgcaagtggatattcagacctccttgaggccttcgttggaaacgggatttcttaatattatgctagacagaagaattctcagtaacttccttgtgttgtgtgtattcaactcacagagttgaacgatcctttacacagagcagacttgaaacactctttttgtgaaatttgcaagtggagatttcagccgctttgagttcaatggtagaataggaaatatcttcctatagaaactagacagaatgattctcagaaactcctttgtgatgtgtgcgtacaactcacagagtttaacctttcttttcatagtgcagttaggaaacactctgtaaagtctgcaagtggatattcagacctctttgaggccttcgttggaaacgggatttcttcatattatgctagacagaagaattctcagtaaattccttgtgttgtgtgtattcaactgacagagttgaactttcatttggagagagcagatttgaaacactatttttgtggaatttgcaagtggagatttcaagcgctttggggccaaaggcagaaaaggaaatatcttcgtataaaaactagacagaaatcattctcagaaactgctgcgtgatgtgtgcgttcaactctcagagtttaacttttcttttcattcagcggtttggaaacactctgtttgtaaagtctgcacgtggatattttgaccacttagaggccttcgttggaaacgggtttttttcatgtaaggctagacagaagaattcccagtaacttccttgtgttgtgtgcattcaactcacagagttgaacgttcccttagacagagcagatttgaaacactctatttgtgcaatttgcaagtgtagatttcaagcgctttaaagtcaatggaagaaaaggaaatatcttcgtttcaaaactagacagaatcattcccacaaactgcgttgtgatgtgttcgttcaactcacagagtttaacctttctgttcatagagcagttaggaaacactctgtttgtaaagtctgtaagtgaatgttctgacatcttgtggccttcgttggaaacgggatttcttcatattctgctagacagaagaattctcagtaacttccttgtgttgtgtgtattcaactcacagagttgaacgatcctttacacagagcagacttgaaacactctttttgtggaatttgcaagtggagatttcagcctctttgaggtcaatggtagaataggaaatatcttcctatagaaactaggcagaatgattctcagaaacttcattgtgatgtgtgcgttcaactcacagagtttaacctttcttctcatagagcagttaggaaacactctgtttgtaaactgtgcaagtggatattcagacctctttgaggccttcgttggaaacggaatttcttcatactatgctagacagaagaattctcagtaactttcttgtgttgtgtgtattcaactcacagagttgaacgatcctttacacagagcagacttgaaacactctttttgtggaatttgcaagtggagatttcaagcgctttggggctaaaggcagaaaaggaaatatcttcgtataaaaactagacagaatcattctcagaaactgctgcgtgatgtgtgccttcaactctcagagtttaacttttcttttcattcagcggtttggaaacactctgtttgtaaagtctgcacgtggaaattttgaccacttagaggccttcgttggaaacgggtttttttcatgtaaggctagacagaagaattcccagtaacttccttgtgttgtgtgtattcaactcacagagttgaactttcccttagacagagcagatttgaaacactctttttgtgcaatttggaagtggagatttcaagcgctttagggtcaatggcagaaaagaaaatatcttcatctcaaaactagacagaatcattcccacaaactgcgttgtgatgtgttcgttcaactcacagcagtttaaccttgcttttcatagagcagttaggaaacagtctgtttgtaaattctgtaagtggatattctgacatcttgtggccttccttggaaacgggatttcttcatattctgctagacagaagaattctcagtaacttccttgtgttgtgtgcattcaaatcacagagttgaaagatcctttacacagagcagattagaaacactctttttgtggaacttgcaattggatatttcagccgctttgaggtcaatggtagaaaaggaaatatcttcgtataaaaactagacagaatgattctcagaaactcctttgtgatgtgtgcgtacaactcacagagtttaacctttcttttcatagagtagttaggaaacactctgtttgtaaagtctgcaagtggatattcagacctctttgaggccttcgttggaaacgggtttttttcatataaggctacacagaagaattcccagtaacttccttgtgttgtgtgtgttcaactcacagagttgaactttcatttacacagagcagatttgaaacactctttttgtggaatttgcaactggagatttcaagcgatttgaggccaaaggcagaaaaggaaatatcttcgtttcaaaactagacagaatcattctcagaaactgctgtgcgatgtgtgcgttcaactctcagagtttaacttttcttttcattcagcagtttggaaacactctgtttgtaaagtctgcacgtggatattttgaccacttagaggccttcgttggaaacgggtttttttcctgtaaggctagacagaagaattcccagtaacttccttgtgttgtgtacattcaactcacagagttgaacgttcccttagacagagcagatttgaaacactctttttgtgcaattggcaagtggagatttcaagcgctttaaggtcaatggcagaaaaggaaatatcttcgtttcaaaactagacagaatcattcccacaaactgcgttgtgatgtgttcgttcaactcacagagtttaacctttcttttcatagagcagttaggaaacaatctgtttgtaaattctgtaagtggatattctgacatcttgtggccttcgttggaaacgggatttcttcatattgctgctagacagaagaattctcagtaacttccttgtgttgtgtgtattcaactcaaagagttgaacgatcctttacacagagcagacttgaaacactctttttgtggaatttgcaagtggagatttcagcctctttgaggtcaatggtagaataggaaatatcttcctatagaaactagacagaacgattctcagaaactcctttgtgatgtgtgcgttcaactcacagagtttcacctttcttttcatagagcagttaggaaacactctgtttgtaaagtctgcaagtggatattcagacctctttgaggccttcgttggaaacgggatttcttcatattctgctagacagaagaattcccagtaacttccttgtgttgtgtgtgttcaactcacagagttgaactttcatttacacagagcatctttgaaacactctttttgtggaatttgcaagtggagatttcaagcgctttgaggccaaaggcagaaaaggaaatatcttcgtttcaaaactagacagaatcattctcagaaactgctctgcgatgtgtgcgttcaactctcagagtttaacttttcttttcattcagcagtttggaaacactctgtttgtaaagtctgcacgtggataacttgaccacttagaggccttcgttggaaacgggtttttttcctgtaaggctagacagaagaattcccagtaacttccttgtgttgtgtgcattcaactcacagagttgaacgttcccttagacagagcagatttgaagcactctatttgtgcaatttgcaagtgtagatttcaagcgctttatggtcaatggcagaaaaggaaatatcttcatttcaaaactagacagaatcattcccacaaactgcgttgtgatgtgttcgttcaacacacagagtttaacctttctgttcatagagcagttaggaaaaactctgtttgtaaagtctgtaagtagatattctgacatcttgtggccttcgttggaaacgggatttcttcatattctgctagacagaagaattctcagtaacttccttgtgttgtgtgtattcctctcacagagttgaacgatcctttacacagagcagacttgaaaacagtctcttttgtggaatttgcaagtggagatttcagccgctttgaggtcaatggtagaaaaggaaatatcttcgtataaagactagacagaatgattctcagaaactcctttgtgatgtgtgtgttcaactcacagagtttaacctttcttttcatagagcagttaggaaacactctgtttataaagtctgcaagtggatattcagacccatttgaggccttcgttggaaacgggatttcttcatattatgctagacagaagaattctcagtaacttccttgtgttgtgtgtattcaactgacagagttgaactttcatttacagagagcagatttgaaacactgtttttgtggaatttgcaagtggagatttcaagcgctttgcggccaaaggcagaaaaggaaatatcttcgtataaagactagacagaatcattctcagaaactgctctgcgatgtgtgcgttcaactctcagagtttaacttttcttttcattcagcagtttggaaacactctgtttgtaaagtctgcacgtggatattttgaccacttagaggccttctttggaaacgggtttttttcctgtaaggctagacagaagaattcccaggaacttccttgtgttgtgtacattcaactcacagagttgaacgttcccttagacagagcagatttgaaacactctttttgtgcaattggcaaatggagatttcaagcgctttaaggtcaatggcagaaaaggaaatatcttcgtttcaaaactagacagaatgattctcataaactcctttgtgatgtgtgcgttcaactcacagagtttaacctttcttttcatagagcagttaggaaacactctgtttgaaaagtctgcaagtggatattcagacctccttgaggccttcgttggaaacgggaattcttcatattctgctagacagaagaattctcagtaacttccttgtgtggtgtgtattcaactcacagagttgaacgatcctttacacagagcagacttgaaacactctttttgtggaatttgcaagtggagatttcagccgctttgaggtcaatggtagaaaaggaaatatcttcgtataaagactagacagaatgattctcagaaactcctttgtgatgtgtgcgttcaactcacagagtttaacctttcttttcatagagcagttaggaaacactctgtttgtaaagtctgcaagtggatattcagacctccttgaggccttcgttggaaacgggatttcttcatattatgctagacacaagaattctcagtaacttccttgtgttgtgtgtattcaactcacagaattgaacgatcctttacacagagcagacttgaaacactctttttgtggaatttgcaagtggagatttcagccgctttgaggtcaatggtagaataggaaatatcttcctatagaaactagacagagatcattctcagaaactgctgcgtgatgtgtgcgttcaactctcagagtttaacttttcttttcattcagcggtttggaaacactctgtttgtaaagtctgcacgtggatattttgaccacgtagaggccttcgttggaaacgggtttttttcatgtaaggctagacagaagaattcccagtaacttccttgtgttgtgtgcattcaactcacagagttgaacgttcccttagacagagcagattggaaacactctgtgcaatttgcaagtgtagatttcaagcgctttaaggtcaacggcagaaaaggaaatatcttcgtttcaaaactagacagaatcattctcagaaactgctctgcgatgtgtgcgttcaactctcagagttcaacttttcttttcattcagcagtttggaaacattctgtttgtaaagtctgcacgtggataatttgactacttagaggccttcgttggaaacgggtttttttcatgtaaggctagacagaagaattctcagtaacttccttgtgttgtgtgtattcaactcacagagttgaacgatcctttacacagagcagacttgtaacactctttttgtggaattcgcaagtggagatttcagcagctttgaagtcaaaggtagaaaaggaaatatcttcctataaaaactagacagaatgattctcagaaactcctttgtgatgtgtgcgttcaactcacagagtttaaccattcttttcatagagcagttaggaaacactctgtttgtaaagcctgcaagtggatattctgacctccttgaggccttcgttggaaacgggatttcttcatattctgctagacagaagaattctcagtaacttccttgtgttgtgtgtattcaactcacagagttgaacgatcctttacacagagcagacttgaaacactctttttgtgtaatttgcaagtggagatttcatccgctttgaggtcaatagtagaaaagaaaatatcttcatagaaaaactagacagaatcattctcagaaactgctgcgtgatgtgtgcgttcaactctcacagtttaacttttcttttcattcagcggtttggaaacactctgtttgtaaagtctgcacgtggatattttgaccacttagagtccttcgttggaaacgggtttttttcatgtaaggctagacagaagaattcccagtaacttccttgtgttgtgtgcattcaactcacagagttgaacgtccattagacagagcagatttgaaacactctatttgtgcaatttgcaagtgtagatttcaagcgctttaaggtcaatggcagaaaaggaaatatcttcgtttcaaaactagacagaatcattcccacaaactgccttgtgatatgttcgttcaactcacagagtttaacctttctgttcatagagcagttaggaaacactctgtaacgtctgtaagtggatattctgacatcttgtggccttcgttggaaacgggatttcttcatattctgctagacagaagaattctcagtaacttccttgtgttgtgtgtattcaactcacagagttgaacgatcctttacacagagcagacttgaaacactctttttgtggaatttgcaagtggagatttcagccgctatggggtcaatggtagaataggaaatatcttcctatagaaactagacagaatgattctcataaactcctttgtgatgtgtgcgttcaactcacagagtttaacctttcttttcatagaacagttaggaaacactctgtttgtaaagtctgcaagtggatattcagacctccttgaggccttcgttggaaacgggatttcttcatattctgctagacagaagaattcccagtaacttccttgtgatgtgtgtgttcaactcacagagttgaactttcatttacacagagcagattggaaacactctttttgtggaatttgcaagtggagatttcaagcgctttgaggccaaaggcagaaaaggaaatatcttcgtataaaaactacacagaatcattctcagaaactgctctgcgatgtgtgcgttcaactctcagagtttaacttttcttttcattcagcagtttggaaacactctgtttgtaaagtctgcacgtggataatttgaccacttagaggccttcgttggaaacgggtttttttcctgtaaggctagacagaagaattcccagtaacttccttgtgttgtgtgcattcaactcacagagttgaacgttcccttagacagagcagatttgaaacactctatttgtgcaatttgcaagtgtagatttcaagcgctttaaggtcaatggcagaaaaggaaatatcttcgtttcaaaactagacagaatcattcccacaaactgcgttgtgatgtgttcgttcaactcacagagtttaacctttctgttcatagagcagttaggaaacactctgtttgtaaagtctgtaagtggatattctgacgtcttgtggccttcgttggaaacgggatttcttcatattctgctagacagaagaattctcagtaacttccttgtgttgtgtgtattcaactcacagagttgaacgatcctttacacagagcagacttgaaacattctttttgtggaatttgcaagtggagattttagccgctttgaggtcaatggtagaataggaaatatgttcctatagaaactagacagaatgattgtcagaaactcctttgtgatgtgtgcgttcaactcacagagtttaacctttctgttcatagagcagttaggaaacactctgtttgtaaagtctgcaagtggatattcagacctccttgaggccttcgttggaaacgggatttcttcatattctgctagacagaagaattctcagtaacttccttgtgttgtgtgtattcaactgacagagttgaactttcatttagagagagcagatttgaaacactgtttttgtggaatttgcaagtggagatttcaagcggtttggggccaaaggcagaaaaggaaatatcttcgtataaaaactagacagaatcattctcagaaactgctgcgtgatgtgtgcgttcaactctcagagtttaacttttcttttcattcagcggtttggaaacactctgtttgtaaagtctgcacgtggatattttgaccacttagaggccttcgttggaaacgggtttttttcatgtaagcctagacagaagaattcccagtaacttccttgtgttgtgtgcattcaagtcacagagttgaacgtttccttagacagagcagaattgaaacactctatttgtgcaatttgcaagtgtagatttcaaccgctttaaggtcaacggcagaaaaggaaatatcttcgtttcaaaactagacagaatgattctcagaaactcctttgtgatgtgtgcattcaactcacagtttaacctttcttttcatagagcagttaggaaacactctgtttgtaaagtctgcaagtggatattcagacctccttgaggccttcgttggaaacgggatttcttcatattatgctagacagaagaattctcagtaacttccttgtgttgtgtgtattcaactcacagagttgaacgatgctttacacagagcagacttgaaacactctttttgtggaatttgcaagtggagatttcagccgctttgaggtcaatggtagaaaaggaaatatcttcgtataaaaactagacagaatgattctcagaaactcctttgtgatgtgtgcgttcaactcacagagtttaacctttcttttcatagaacagttaggaaacactgtgtttgtaaagtctgcaagtggatattcagacctccttaaggccttcgttggaaacgggatttcttcatattatgctagacagaagaattctcagtaacttccttgtgttgtgtgtattcaactgacagagttgaactttcatttagagagagcagatttgaaacactgtttttgtggaatttgcaagtggagatttcaagcgctttggggccaaaactagacagaatgattctcagaaactcctttgtgatgtgtgcgttcaactcacagagtttaacctttcttttcattcagcggtttggaaacactctgtttgtaaagtctgcacgtggatattcagacctctttgaggccttcgttggaaacgggtttttttcatgtaaggctagacagaagaattcccagtaacttccttgtgttgtgtgcattcaactcacagagttgaacgttcctttagacagagcagatttgaaacactctatttgtgcaatttgcaagtgtagttttcaagctctttaaggtcaacggcagaaaaggaaatatcttggtttcaaaactagacagaatcattcccacaaactgcgttgtgatgtgttcgttcatctcacagagtttaacctttcttttcatagagcagttaggaaacagtctgtttgtacattctgtaagtggatatcctgacatcttgtggccttcgttggaaacgggatttcttcatattctgctagacagaagaattctcagtaacttccttgtgttgtgtgtattcaactcacagagttgaacgatcctttacacagagcagacttgaaacactctttttgtggaatttgcaagtggagatttcagccgctttgatttcaatggtagaaaaggaaatatcttcgtataaagactagacagaatgattctcagaaactcctttgtgatgtgtgcgttcaactcacagagtttaacctttcttttcatagagcagttaggaaacactctgtttgtaaagtctgcaagtggatattcagacatctatgaggccttcgttggaaacgggatttcttcatgttctgctagacagaagaattctcagtaactttccttgtgttgtgtgttttcaactcacagagttgaacgatcctttacacagagcagacttgaaacactccttttgtggaatttgcaagtggagatttcagccgctttgaggtcaatggtacaataggaaatatcttcctatagaaagtagacagaatgattctgagaaactcctttgtgatgtgtgcgttcaactcacagagtttaacctttcttttcatagagcagttaggaaacactctgtttgtaaagtctgcaagtggatattcagacatctttgaggctttctttggaaacgggatttcttcatattctgctatacagaagaattctcagaaacttccttgtgttgtgtgtattcaactcacagagttcaacgatcgtttacacagagcagacttgagacactctttttgtggaatttgcaagtggagatttcagccgctttgaggtcaatggtagaaaaggaaatatcttcatataaaaaatagacagaatcattcccacaaactgcgttgtgatgtgttcgttcaactcacagagtttaaccttcctgttcatagagcagttaggaaacactctgtttgtaaagtctgtaagtggatattctgacatcttgtggccttcgttgggaacgggatttcttcatattctgctagacagaagaattctcagaatcttccttgtgttgtgtgtattcaactcacagagttgaacgatggtttactcagagcagatttgaaacactctttttgtggaatttgcaagtggagatttcagccgctttgaggtcaatggtagaaaaggaaatatcttcgtacaaaaactagacagaatgattctcagaaactcctttgtgatgtgtgcgttcaactcacacagtttaacctttcttttcatagagcagttaggaaacactctgtttgtaaagtctgcaagtggatattcacacctccttgaggccttcgttggaaacgggatttcttcatattatgctagacagaagaattcccagtaacttccttgtgttgtgtgtgttcaactcacagagatgaactctcatttacacagagcagatttgaaactctctttttgtgtaatttgcaaatggagatttcaagcgctttgaggccaaaggcagaaaaggaaatatcttcgtataaaaactagacagaatcattctcagaaactgctctgcgatgtgtgcgttcaactctcagagtttaacttttcttttcattcagcagtttggaaacactctgtttgtaaagtctgcacgtggatattttgaccacttagaggccttcgttggaaacgggattttttcctgtaaggctagacagaagaattcccagtaacttccttgtgttgtgtgtgttcaactcactgagttgaactttcatttacccagagcagatttgaaacactctttttgtggaatttgcaagtggagatttcaagcgctttgaggccaaaggcagaaaaggaaatatcttcgtttcaaaactagacagaatcattctcagaaactgctctgcaatgtgtgcgttcaactctcagagtttaacttttcttttcattcagcagtttggaaacactctgtttgtaaagtctgcacgtggataatttgaccacttagaggccttctttggaaacgggtttttttcatgtaaggctagacagaagaattctcagtaacttccttctgttgtgtgtattcaactcacagagttgaacgttcctttacacacagcagacttgaaacactctttttgtggaatttgcaagtggagatttcagccgctttgtggtcaatggtagaaaaggaaatatcttcgtataaaaactagacagaatgattctcagaaactcctttgtgatgtgtgtgttcaactcacagagtttaacctttcttttcatagagcagttaggaaacactctgtttgtaaagtctgcaagtggatattcagacctctttgaggccttcgttggaaacgggtttttttcatgtaaggctagacagaagaattctcagtaacttccttgtgttgtgtgtattcaactgacagagttgtactttcgtttagagagagcagatttgaaacactgtttttgtggaatttgcaagtggagatttcaagcgctttggggccaaaggcagaaaaggaaatatcttcgtataaaaactagacagaatcattctcagaaactgctgcgtgatgtgtgctttcaactctcagagtttaacttttcttttcattcagcggtttggaaacactctgtgtgtaaagtctgcacgtggatattttgaccacttagaggccttcgttggaaacgggtttttttcatgtaaggctagacagaagaattctcagtaacttccttgttttgtgtgtattcaactcacagagttgaacgatcctttacacagagcagacttgtaacactctttttgtggaatttgcaagtggagatttcagccgctttgaagtcaaaggtagaaaaggaaatatcttcttataaatactaaacagaatcattcgcacaaactgcgttgtgatgtgttcgttcaactcacagagtttaacctttcttttcatagagcagttaggaaacagtctgtttgaaaattctgtaagtggatattctgacatcttgtggccttcgttggaaacgggatttcttcatattctgctagacagaagaattctcagaatcttccttgtgttgtgtgtattcaactcacagagttgaacgatggtttacacagagcagatttgaaacactcatttggtggaatttgcaagtggagatttcagccgctttgaggtcaatggtagaaaaggaaatatcttcgtataacaactagacagaattattctcagaaactcctttgtgatgtgtgcgttcaactcacagagtttaacctttcttttcatagagcagttaggaaacactctgtttgtaaggtctgcaagtggatattcagagatccttgaggccttctttggaaacgggatttcttcatattatgctggacagaagaattctcagtaacttccttgtgttgtgtgtattcaactgacagagttgaactttcatttagagagagcagatttgaaacactgtttgtgtggaatttgcaagtggagatttcaagcgctttggggccaaaggcagaaaaggtaatatcttcgtataaaaactagacagaatcattctcagaaactgctctgcgatgtgtgcgttcaactctcagagtttaacttttcttttcattcagcagtttggaaacactctgtttgtaaagtctgcacgtggataatttgaccacttagaggccttcattggaaacgggtttttttcctgtaaggctagacagaagaattcccagtaacttcccttgtgttgtgtacattcaactcacagagttgaacgttcccttagacagagcagatttgaaacactctttttgtgcaattggcaagtggtgatttcagcctctttgaggtcaatggtagaaaaggaaatatcttcgtataaaaactagacagaatgattctcagaaactcctttgtgatgtgtgtgttcaactcacagagtttaacctttcttttcatagagcagttaggaaacactctgtttgtaaagtctgcaagtggatattcagacctgctttgaggccttcgttggaaacgggtttttttcatataaggctagacagaagaattcccagtaacttccttgtgttgtgtgtgttcaactcacagagttgaactttcatttacacagagcagatttgaaacactctttttgtggaatttgcaagtggagatttcagccgctttgaggtcaatggtagaaaaggaaatatcttcgtataaaaactagacagaatgattctcagaaactcctttgtgatgtgtgcgttcaactcacagagtttaacctttcttttcatagagcagttaggaaacactctgtttgtaaactctgcaagtggatattcagacctctttgaggccttcgttggaaacgggatttcttcatactatgctagacagaagaattcttagtaacttccgcgtgttgtgtgtattcaactcacagagttgaacgatcctttacacagagcagacttgaaacactctttttgtggaatttgcaagtggagatttccgccgctatgtggtcaatggtagaaaaggaaatatcttcctataaaaactagacagaatcattctcagaaactgctgcgtgatgtgtgcgttcaactctcagagtttaacttttcttttcattcagccgtttggaaacactctgtttgtaaagtctgcacgtggatattttgaccacttagaggccttcgttggaaacgggttttttgcatgtaaggctaaacagaagaattcccagtaacttccttgtgttgtgtgcattcaactcacagagttgaacgttcccttaggcagagcagatttgaaacactctatttgtgcaatttgcaagtgtagatttcaagcgctttaaggtcaatggcagaaaaggaaatatcctcgtttcaaaactagacagaatgattctcagaaaattctttgtgatgtgtgcgttccactcacagagtttaacctttcttttcatagagcagttaggaaacactctgtttgtaaactctgcaagtggatattcagacctctttgaggccttctttgcaaacgggatttcttcatattatgcctgagagaagaattctcagtaacttcccttgtgctgtgtgtattcaactcacagagttgaacgatcctttacacagagcagacttgatacactctttttgtggaatttgcaagtggagatttcagccgctttgaggtcaatggtagaaaaggaaatatcttcgtataaaaactagacagaaatgattctcataaactcctttgtgatgtgtgcgttcaactcacagagtttaacctttcttttcatagagcagttaggaaacactctgtttgtaaagtgtgcaagtggatattcagacctccttgaggccttcgttggaaacgggatttcttcatattctgctagacagagaattcccagtaacttccttgtgttgtgtgtgttcaactcacacagttgaactttcatttacacagagcagatttgaaacactctttttgtggaatttgcaaatggagatttcagccgcgttgaggtcaacggtagaaaaggaaatatcttcgtttcaaaactagacagaatcattctcagaaactgctgcatgatgtgtgcgttcaactctcagagtttaacttttcttttcattcagcggtttggaaacactctgtttgtaaagtctgcacgtggatattttgaccacttagaggccttcgttggaaacgggtttttttcatataaggctagacagaagaattcccagtaacttccttgtgttgtgtgcattcaactcacagagttgaacgttcccttagacagagcagatttgaaacactctatttgtgcaatttccaagtgtagatttcaagcgctttaaggtcaacggcagaaaaggaaatatcttcgtttcaaaactagacagaatgattctcagaaacttctttgtgatgtgtgcgttcaactcacagagtttaacctttcttttcatagagcagttaggaaacagtctgtttgaaaattctgtaagtggatattctgacatcttgtggccttcgttggaaacgggatttcttcatattctgctagacagaagaattgtcagtaacttccttgtgttgtgtgtattcaactcacagagttgaatgatcctttacacagagcagacttgaaacactctttatgtggaatttgcaagtggagatttcagccgctttgagttcaatggtagaataggaaatatcttcctatagaaactagacagaatgattctcagaaactcctttgtgatgtgtgcgttcaactcacagagtttatcctttcttttcatagagcagttaggaaacactctgtttgtaaagtctgcatgtggatattcagacatcattgaggccttcgttggaaacgggatttcttcatgttctgctagacagaagaattctcagtaacttccttgtgttgtgtgtattcaactgacagagttgaactttcatttagagagagcagatttgaaacactgtttttgtggaattttcaagtggagatttcaagcgctttggggccaaaggcagaaaaggaaatatcttcgtataaaaactagacagaatcattctcagaaactgctctgcgatgtgtgcgttcaactatcagagtttaactttgcttttcattcagcagtttggaaacactctgtttgtaaagtctgcacgtggataatttgaccacttagaggccttcgttggaaacgggtttttttcatgtaaggctagacagaagaattcccagtaacttccttgtgttgtgtacattcaactcacagagttgaacgttcctttagacagagcagatttgaaacactctttttgtgcaattggcaaatggagatttcaagcgctttaaggtcaatggcagaaaaggaaatatcttcgtttcaaaactagacagaatcattcccacaaactgcgttgtgatgtgttcgttcaaatcacagagtttaaactttcttttcatagagcagttaggaaacagtctgtttgtaaattctgtaagtggatattctgacatcttgtggcctacgttggaaacgggatttcttcaaattctgctagacagaataattctcagtaacttccttgtgttgtgtgtattcaactcacagagttgaacgatcctttacagagagcaggcttgaaacagtctttttgtcgaatttgcaagtggagatttcagccgctttgaggtcaatggtagaataggaaatatcttcttatagaaactagacagaatgattctcagaaactcctttgtgatgcgtgcgttcaactcacagagtttaacctttcttttcatagagcagttaggaaacactctgtttgtaaagtctgcaagtggatattcagacatccttgaggctttcgttggaaacgggatttcttcatattctgctagaaagaagaattctcagtaacttccttgtgttgtgtgtattcaactgacagagttgaactttcatttagagagagcagatttgaaacactgtttttgtggaatttgcaagtggagatttcaagcgctttgtggccaaaggcagaaaaggaaatatcttcgtataaaaactagacagaatcattctcagaaactgctgcgtgatgtgtgcgttcaactctcagagtttaacttttcttttgattcagcggtttggaaacactctgtttgtaaagtctgcacgtggatattttgaccacttagaggccttcgttggaaacgggtttttttcatgtaatgctagacagaagaattcccagtaacttccttgttttgtgtgcattcaactcacagagtttaacgttcccttagacagagcagatttgaaacactctatttgtgcaatttgcaagtgtagatttcaagcgctttaaggtcaacggcagaaaaggaaatatcttcgtttcaaaactagacagaatcattcccacaaactgcgttgtgatgtgttcgttcaactcacagagtttaacctttctgttcatagagcagttaggaaacactctgtttgtaaactctgtaagtggatattctgacatcttgtggccttcgttggaaacgggatttcttcacattctgctagacagaagaattctcagtaacttccttgtgttgtgtgtattcaactcacagagttgaatgatcctttacacagaacagtcttgaaacactctttttgtggaatttgctagtggagatttcagccgctttgatgtcaatggtagaataggaaatatcttcctatagaaactagacagaatgattctcagaaactcctttgtgatgtgtgcgttcaactcacagagtttaacctttcttttcatagagcagttaggaaacactctgtttgtaaagtctgcaagtggatattcagacctctttgaggccttcgttggaaacgggtttttttcatataaggctagagagaagaattcccagtaacttccttgtgttgtgtgtgttcaactcacagagttgaactttcatttacacagagcagatttgaaacactctttttgtggaatttgcaaatggagatttcaagcgctttgaggccaaaggcagaaaaggaaatatcttcgtataaaaactggacagaatcattctcagaaactgctctgcgatgtgtgcgttcaactctcagagtttaacttttcttttcattcagcagtttggaaacactctgtttgtaaagtctgcacgtggataacttgaccgcttagaggccttcgttggaaacgggtttttttcacgtaaggctagacagaagaattcccagtaacttccttgtgttgtgtgcattcaactcacagagttgaacgttcccttagacagagcagatttgaaacactctacttgtgcaatttgcaagtgtagatttcaagcgctttaaggtcaatggcagaaaaggaaatatcttcgtttcaaaactagacagaatcattcccacaaactgcgttgtgatgtgttcgttcaactcacagagtttaacctttctgttcatagagcagttagaaaacactctgtttgtaaagtctgtaagtggatattctgacattttgtggccttcgttggaaatgggatttcttcatattctgctagacagaagaattctcagtaacttccttgtgttgtgtgtattcaactcacagagttgaactatcctttacacagagcagacttgaaacactcgttttgtggaatttgcaagtggagatttcagccgctttgaggtcaatggtagaaaaggaaatatcttcgtataaaaactagacagaatgattctcagaaactcctttgtgatgtgtgtgttcaactcacagagtttaacctttcttttcatagagcagttaggaaacactctgtttgtaaagtctgcaggtggatattcagacctctttgaggccttcgttggaaacgggtttttttcatataaggctagacagaagaattcccagtaacttccttgtgttgtctgtgttcaactcacagagttgaactttcatttacacagagcagatttgaaacactctttttgtggaatttgcaagtggagatttcaagcgctttgaggccaaaggcagaaaaggaaatatcttcgtttcaaaactagacagaatcattctcagaaactgctctgcgatgtgtgcgttcaactctcagagtttaacttttcttttcattcagcagtttggaaacactctgtttgtaaagtctgcacgtggataacttgaccacttagaggccttcgttggaaacgggtttttttcatgtaaggctagacagaagaattctcagtaacttccttgtgttgtctgtattcaactcacagagttgaacgatcctttacagagagcagacttgtaacactctttttgtggaatttgcaagtggagatttcagccactttgaagtcaaaggtagaaaaggaaataacttcctataaaaactagacagaatcattcccacaaactccgttgtgatgtgttcgttcaactcacagagtttaacctttctgttcatagagcagttaggaaacactctgtttgtaaagtctgtaagtggatattctgacatcttgtggccttcgttggaaacgggatttcttcatattctgctagacagaagaattctcagtaacttccttgtgttgtgtgtattcaactcacagagttgaacgatcctttacacagagcagacttgaaacactctttttgtggaatttgcaagtggagatttcagccgctttgaggtcaatggtagaaaaggaaatatgttcgtataaagattagacagaatgattctcagaaactcctttgtgatgtgtgtgttcaactcacagagtttaacctttcttttcatagagcagttagtaaacactctgtttataaagtctgcatgtggatattcagacccctttgaggccttcgttggaaacgggatttcttcatattatgctagacagaagaattcccagtaacttccttgtgttgtgtgtgttcaactcacagaattgaactttcatttacccagagcagatttgaaacactctttttgtggaatttgcaagtggagatttcaagcgctttgaggccaaaggcagaaaaggaaatatcttcgtttcaaaactagacagaatcattctcagaaactgctctgcgatgtgtgcgttcaactctcagagtttaacttttcttttcattcagcagtttggaaacactctgtttgtaaagtctgcacgtggatattttgaccatttagaggccttcgttggaaacgggtttttttcttgtaaggctagacagaagaattcccagtaacttccttgtgttgtgtacattcaactcacagagttgaacgttcccttagacagagcagatttgaaacactctttttgtgcaattggcaagtggagatttcaagcgctttaaggtcaatggcagaaaaggaaatatcttcgtttcaaaactagagagataatcattcccacaaactgcgttgtgatgtgttcgttcaactcacagagtttaacctttcttttcatagagcagttaggaaacagtctgtttgtcaattctgtaagtggatattctgacatcttgtggccttcgttggaaacgggatttcttcatattctgctagacagaagaattctcagtaacttccttgtgttgtgtgtattcaactcacagagttgaacgatcctttacacagaacagacttataacactctttttgtggaatttgcaagtggagatttcagccactttgaagtcaaaggtagaaaaggaaataacttcctataaaaactagacagaatgattctcagaaacttctttgtgatgtgtgcgttcaactcacagagtttaacctttcttttcatagagcagttaggaaacactctgtttgtaaactctgcaagtggaaattcagacctctttgaggccttcgttggaaacgggatttcttcatactatgctagacagaagaattcccagtaacttccttgtgttgtgtgtgttcaagtcacagagttgaactttcatttacacagagaagatttgaaacactgtttttgtggaatttgcaagtggagatttcaagcgctttgaggccaaaggcagaaaaggaaatatcttcgtttcaaaactagacagaatcattctcagaaactgctctgcgatgtgtgcgttcaactctcagagtttaacttttcttttcattcagcagtttggaaacactctgtttgtaaagtctgcacgtggatattttgaccacttagaggccttcgttggaaacgggtttttttcatgtaaggctagacagaagaattctcagtaacttccttgtgttgtgtgtattcaactcacagagttgaacgatcctatacacagagcagacttgtaacactctttttgtggaatttgcaagtggagatttcagccgctttgaagtcaaaggtagaaaaggaaatatcttcctataaaaactagacagaatgattctcagcaaactcctttgtgatgtgtgcgttcaactcacagagtttaactttttttttcatagagcagttaggaaacactctgtttgtaaagtctgcaagtggatattcagacctctttgaggccttcgttggaaacgggtttttttcatataaggctagacagaagaattctcagtaacttccttgtgttgtgtgtattcaactcacagagttgaacgatcctttacacagagcagacttgaaacactcttttagtggaatttgcaagtggagatttcagccgctttgaggtcaatggtagaataggaaatatcttcctatagaaactagacagaatgattttcagaaactcctttgtgatgtgtgcgttcaattcacagactttaacttttcatagagcagttaggaaacactctgtttgtaaagtctgcaagtggatattcagacctctttgaggccttcgttggaaacgggatttcttcatattatgctagacagaagaattctcagtaacttcctggtgttgtgtgtattcaactgacagagttgaactttcatttagagagggcagatttgaaacactgtttttgtggaatttgcaagtggagatttcaagcgctttggggccaaaggcagaaaaggaaatatcttcgtataaaaactagacagaatcattctcagaaactgctctgcgatgtgtgcgttcaactctcagagtttaactttgcttttcattcagcagttttgaaacactctgtttgtaaagtctgcacgtggataatttgaccacttagaggccttcgttggaaacgggtttttttcatgtaaggctagacagaagaattcccagtaacttccttgtgttgtgtgcattcaactcacagagttgaacgttcccttagaccgagcagatttgacacactctatttgtgcaatttgcaagtgtagatttcaagcgctttaaggtcaacggcagaaaaggaaatatcttcgtttcaaaactagacagaatcattcccacaaactgcgttgtgatgtgttcgttcaactcacagagtttaacctttcttttcatagagcacttaggaaacagtctgtttgtaaattctgtaagtggatattctgacatcttgtggccttcgttggaaacgggatttcttcatattctgctagacagaagaattctcagaatcttccttgtgttgtgtgtattcaactcacagagttgaacgatccttttcacagagcagacttgaaacactgtttttgtggaatttgcaagtggagatttcagccgcgttgaggtcaatggtagaaaaggaaatatcttcgtataaaaactagacagaatgattctcagaaacttctttgtgacgtgtgcgttcaactcacagagtttaacctttcttttcatagagcagttaggaaacactctgtttgtaaactgtgcaagtggatgttcagacctctttgaggccttcgttggaatcgggatttcttcatactgtgctagacagaagatttctcagtaacttccttgtgttgtgtgtattcaactcacagagttgaacgatcctttacacagagcggacttgaaacactctttttgtggaatttgcaagtggagatttcagccgcgttgaggtcaatggtagaaaaggaaatctcttcgtataaaaactagacagaatcattctcagaaactgctctgcgatgtgtgcgttcaactctcagagtttaacttttcttttcattcagcagtttggaaacactctgtttgtaaagtctgcacgtggatattttgaccacttagaggacttcgttggaaacgggtttttttcctgtaaggctagacagaagaattcccagtaacttccttgtgttgtgtacattcaactcacagagttgaacgttcccttagacagagcagatttgaaacactctttttgtgcaattggcaagtggagatttcaagcgctttaaggtcaatggcagaaaaggaaatatcttcgtttcaaaactagacagaatcattcccacaaactgcgttgtgatgtgttcgttcaactcacagagtttaacttttcttttcatagagcagttaggaaacactctgtttgtaaagtctgcaagtggatattcagacctccttgaggccttcgttggaaacgggatttcttcatattctgctagacagaagaattctcagtaacttccttgtgttgtgtgtattcaactcacagagttgaacgatcctttacacagagcagacttgaaacactctatttgtagaacttgcaagtggagatttcagccgctttgaggtcaatagtagaaaaggaaatatcttcgtagaaaaactagacagaatgattctcagatactcctttgtgatgtgtgcgttcaactcacagagtttaacctttcttttcatagagcagttaggaaacactgcgtttgtaaagtctgcaagtggatattcagacctccttgaggccttcgttggaaacgggatttcttcatattatgctagacagaagaattcccagtaacttccttgtgttgtgtgtgtttaactcacagagttgaactttgatttacacagagcagatttgaaacactctttttgtggaatttgcaagtggagatttcaagcgctttgaggccaaaggcagaaaaggaaatatcttcgcataaaaactagacagaatcattctcagaaactgctgcgtgatgtgtgcgttcaactctcagagtttaacttttcttttcattcagcggtttggaaacactctgtttgtgaagtctgcccgtggatattttgaccccttagaggccttcgttggaaacgggtttttttcatgtaaggctagacagaagaattctcagtaacttccttgtgttgtgtacattcaactcacagagttgaacgttcccttagacacagcagatttgaaacactctttttgtgcaattggcaagtggagatttcaagcgctttgaggtcaatggcagaaaaggaaatatcttcgtttcaaaactagacagaatcattcccacaaactgcgttgtgatgtgtgcgttcaactcaaagagtttaacctttcttttcataaagcagttaggaaacactctgtttgtaaagtctgcaagtggatattcagacctccttgaggccttcgttggaaacgggatttcttcatattctgctagacagaagaattctcagtaacttccttgtgttgtgtgtattcaactcacagagttgaaggatcctttacacagagcagacttgaaacactctttttgtggaatttgcaagtggagatttcagccgctttgaggtcaatggtagaaaaggaaactatcttcatataaagactagacagaatgattctcagaatctcctttatgatgtgtgcgttcaactcacagagtttaacctttcttttcatagagcagttaggaaacactctgtttgtaaagtctgcaagtggatattcagacctctttgaggccttcgttggaaacgggtttttttcatataagactagacagaagaattctcagtaacttccttgtgttgtgtgtattcaactcacagagttgaactttcatttacacagagcagatttgaaacactctttttgtggaatttgcaaatggagatttcaagcgctttgaggccaaaggcagaaaaggaaatatcttcgtataaaaactagacagaatcattctcagaaactgctctgcgatgtgtgcgttcaactctcagattttaacttttcttttcattcagcagtttggaaacactctgtttgtaaagtctgcacgtggatattttgaccacttagaggccttcgttggaaacggggttctttcctgtaaggctagacagaataattcccagtaacttcctagtgttgtgtgcattcaactcacagagatgaacgttcccttagacagagcagatttgaaacactctgtgcaatttgcaagtgtagatttcaagcgctttaatgtcaatggcagaaaaggaaatatcttcgcttcaaaactagacagaatcattcccacaaactgcgttgtgatgtgttcgttcaactcacagagtttaacctttcttttcatagagcagttaggaaacagtctgtttgtcaattctgtaagtggatattctgacatcttgtggcattcgttggaaacgggatttcttcatattctgctagacagaagaattctcagtaacttccttgtgtagtgtgtattcaactcacagagttgaacgatcctttacacagagcagagttgaaacactctttttgtggaatttgcaagtggagatttcaggcgctttgaggtcaatggtagaaaaggaaatatcttcgtataaagactagacagaatgattctcagaaactcctttgtgatgtgtgcgttcaactcacagagtttaacctttctattcatagagcagttaggaaacactctgtttgtcaagtctgcaagtggatactcagacctctttgaggccttcgttggaaacgggtttttttcatataaggctagacagaagaattctcagtaacttccttgtgttgtgtgtattcaactgacagagttgaactttcatttagagagagcagatttcaaacactgtttttgtggaatttgcaagtggagatttcaagcgctttggggccaaaggcagaaaaggaaatatcttcgtataaaaactagacagaatcattctcagaaactgctctgtgatgtgtgcgttcaactctcagagtttaacttttcttttcattcagtactttggaaacactctgtttgtaaagtctgcacgtggatattttgaccacttagaggccttcgatggaaacggggttttttcatttaaggctagacagaagaattcccagtaacttccttgtgttgtgtgcattcaactcacagagatgaacgttcccttagacagagcagatttgaaacactctatttgtgcaatttgcaagtgtagatttcaagctctttaaggtcaatggcagaaaaggaaatatctttgtttcaaaactagacagaatcattcccacaaactgcgttgcgatgtgttcgttcaactcacagagtttaacatttcttttcatagagcacttaggaaacagtctgtttgtaaattctgtaagtggatattctgacatcttgtggccttcgttggaaacaggatttcttcatattctgctagacagaagaattctcagtaacttccttgtgttgtgtgtattcaactcacagacttgaaggatcctttacagagaggaggcttgaaaccctctttttgtcgaatttgcaagtggagatttcagccgctttgaggtcaatggtagaataggaaatatcttcttatagaaactagacaaaatgattctcagaaactcctttgtgatgtgtgcgttcaactcacagagtttaacctttcttctcatagagcagttaggaaacactctgtttgtaaagtctgcaagtggatattcagacctctttgaggccttcgttggaaacgggtttttttcatataaggctagacagaagaattcccagtaacttccttgtgttgtgtgtgttcaactcacagagttgaactttcatttacacagagcagatttgaaacactctttttgtggaatttgcaagtggagatttcaagcgctttgaggccaaaggcagaaaaggaaatatcttcgttgcaaaactagacagaaatcattctcagcaaactgctgcgtgatgtgtgcgttcaactctcagagtttaacttttcttttcattcagcggtttggaaacactctgtttgtaaagactgcacgtggatattttgaccacttagaggccttcgttggaaaggggttttttttcatgtaaggctagacagaagaattcccagtaacttccttgtgttgtgtacattcaactcacagagttgaacgttcccttagacagagcagatttgaaacactctttttgtgcaattggcaagtggagatttcaagcgctttgaggtcaatggcagaaaaggaaatatcttcctttcaaaactagacagaatcattcccacaaactgcgttgtgatgtgttcgttcaactcacagagtttaacctttctgttcatagagcagttagcaaacactctgtttgtaaagtctgtaagtggatattcagacatcttgtggccttcgttggaaacaggatttcttcatattctgctagacagaagaattctcagaatcttccttgtgttgtgtgtattcaactcacagagttgaacgatggtttacacacagcagatttgaaacactctttttgtggtatttgcaagtggagatttcagccgctttgaggtcaatggtagaaaaggaaatatcttcgtataaaaactagacagaacgattctcagaaactcctttgtgatgtgtgcgttcaactcacagagtttaacctttctgttcatagagcagttaggaaacactctgtttgtaaagtctgcaagtggatattcagacctctttgaggccttcgttggaaacgggatttcttcatattctgctagacagaagaattcccagtaacttccttgtgttgtgtgtgttcaactcacagagttgaactttcatttacgcagagcagatttgaaacactctttttgtggaatttgcaagtggagatgtcaagcgctttgaggccaaaggcagaaaaggaaatatcttcgtttcaaaactagacagaatcattctcagaaactgctctgcgatgtgtgcgttcaactctcagagtttaacttttcttttcattcagcagtttgaaaacactctgtttgtaaagtctgcacgtggatattttgaccacttagaggccttcgttggaaacgggtttttttcctgtaaggctagacagaagaattcccagtaacttccttgtgttgagtacattcaactcacagagttgaacgttcccttagacagagcagatgtgaaacactctttttgtacaattggcaagtggagatttcaagcgctttaaggtcaatggcagaaaaggaaatatcttcgtttcaaaactagacagaatgattctcagaaacttctttgtgatgtgtgcgttcaactcacagagtttaacctttcttttcatagagcagttaggaaacactctgtttgtaaactctgcaagtggatattcagacctctttgaggccttcgttggaaacgggatttcttcatactgtgctagacataagaattctcagtaacttccttgtgttgtgtgtattcaactcacagacttgaatgatcctttacacagagcagacttgaaacactctttttgtggaatgtgcaagtggagatttcagccgctttgtggtcaatggtagaataggaaatatcttcctatagaaactagacagaatgattctcagaaactcctttgtgatgtgtacgttcaactcacagagtttaacctttcttttcatagagcagttaggaaacactctgtttgtaaagtctgcaagtggatattgagacctctttgaggccttcgttggaaacgggttttttacatataaggctagacagaagaattcccagtaagttccttgtgttgtgtgtgttcaactcacagagttgaactttcatttacacagagcagatttgaaacactctttttgtggaatttgcaaatggagatttcaagcgctttgaggccaaaggcagaaaaggaaatatcttcgtataaaaactagacagaatcattctcagaaactgctctgcgatgtgtgcgttcaactctcagagtttaacttttcttttcattcagcagtttggaaacactctgtttgtaaagtctgcacgtggataatttgaccacttagaggccttcgttggaaacgggtttttttcctgtaaggctagacagaagaattctcagtaacttccttgtgttgtgtgtattcaactcacagagttgaacgatccttcacacagagcagacttggaaaactctttttgtggaatttgcaagtggagatttcagccgctttgaagtcaaaggtagaaaaggaaatatattcctataaaaagtagacagaatcattcccacaaactgcgttgtgatgttttcgttcaactcacagagtttaacctttcttttcatagagcagttaggaaacactctgttggtaaattctgtaagtggatattctgacatcttgtggccttcgttggaaacgggatttcttcatattctgctagacagaagaattctcagtaacttccttgtgttgtgtgtattcaactcacagagttgaacgatcctttacacagagcagacttgaaacactctttttgtggaatttgcaagtggagatttcagccgctttgagctcaatggtagaataggaaatatcttcctatagaaactagacagaacgattctcagaaactcctttgtgatgtgtgcgttcaactcacagagtttaacttttcttttcatagagcagttagtaaacactctgtttataaagtctgcaagtggatattcagacccctttgaggccttcgttggaaacgggatttcttcatattatgctagacagaagaattctcagtaacttccttgtgttgtgtgtattcaactgacagagttgaactttgatttagagagagcagatttgaaacactgtttttgtggaatttgcaagtggagatttcaagcgctttggggccaaaggcagaaaaggaaatatcttcgtataaaaactagacagaatcattctcagaaactcctttgtgatgtgtgcgttcaactctcagagtttaacttttcttttcattcagcggtttggaaacactctgtttgtaaagtcagcacgtggaaattttgaccacttagaggccttcgttggaaacgggtttttttcatgtaaggctagacagaagaattcccaggaacttccttgtgttgtgtacattcaactcacagagttgaacgttcccttagacagagcagatttgaaacactctttttgtgcaattggcaagtggtgatttcagccgcattgaggtcaatggtagaaaaggaaatatcttcgtataaaaactagacagataatcattcccacaaactgcgttgtgatgtgttcgttcaactcacagagtttaacctttcttttcatagagcagttaggaaacactctgttggtaaattctgtaagtggatattctgacatcttgtggccttcgttggaaacgggatttctacatattctgctagacagaagaattctcagtaacttccttgtgttgtgtgtattcaactcacagagttgaccgatcctttacacagagcagacttgtaacactctttttgtggaatttgcaagtggagatttcagccgttttgaagtcaaaggtagaaaagggaatatcttcctataaaaactagacagaatgattctcagaaactcctttgtgatgtgtgcgttcaactcacagagtttaacttttcttttcatagagcagttaggaaacactctgtttgtaaagtctgcaagtggatattcagacctccttgaggccttcattggaaacgggatttcttcatattctgctagacagaagaattctcagtaacttccttgtgttgtgtgtattcagctcacagggttgaacgatcctttatacagagcagacttgaaacactctttttgtgggacttgcaagtggagatttcagccgctttgaggtcaataattgaaaaggaaatatcttcgtagaaaaactagacagaatcattctcagaaactgctgcgtgatgtgtgcgttcaactctcagagtttaacttttcttttcattcagcggtttggaaacactctgtttgtaaagactgcacgtggatattttgaccacttagaggccttcgttggaaacgggttttttttcatgtaaggctagacagaagaattcccagtaacttccttgtgttgtgtgcattcaactcacagagttgaacgttcccttaggcagagcagatttgaaacactctatttgtgcaatttgcaagtgtagatttcaagcgctttaaggtcaacggcagaaaaggaaatatcttcgtttcaaaactagacagaatcattcccacaaactgcgttgtgatgtattcgttcaactcacagagtttaacctttctgttcatagagcagttaggaaacactctgtttgtaaagtatgcaagtggatattcagacctccttgaggccttcgttggaaacgggatttcttcatattctgctagacagaagaattctcagtaacttccttgtgttgtgtgtattcaactcacagggttgaacgatcctttatacagagcagacttgaaacactctttttgtgggacttgcaagtggagatttcagccgctttgaggtcaataatagaaaaggaaatatcttcgtagaaaaactagacagaatgattctcagaaacttcattgtgacgtgtgcgttcaactcacagagtttaacatttcttttcatagagcagttaggaaacactctgtttgtaaagtctgcaagtggatattcagacctctttgaggccttcgttggaaacgggattttcttcatactgtgctagacagaagaattctcagtaacttccttgtgttgtgtgtattccactgacagagttgaactttcatttagagagagcagatttgaaacactgtttttgtggaatttgcaagtggagatatcaagcgctttggggccaaaggcagaaaaggaaatatcttcgtataaaaactagacagaatcattctcagaaactgctgtgtgatgtgtgcgttcaactctcagagtttaacttttcttttcattcagcggtttggaaacactctgtttgtaaagtctgcacgtggatattttgaccacttagaggccttcgttggaaacgggattttttcatgtaaggctagacagaagaattcccagtaacttccttgtgttgtgtacattcaactcacagagttgaacgttcccttagacagagcagatttgaaacactctttttgtgcaattggcaagtggagatttcaagcgctttaaggtcaatggcagaaaaggaaatatcttcgtttcaaaactagacagaatcattcccacaaactgcgttgtgatgtgttcgttcaactcacagagtttaacctttctgttcatagagcagttaggaaacactctgtttgtaaagtctgaaagtggatattctgacatcttgtggccttcgttggaaacgggatttcttcatattctgctagacagaagaattctcagtaacttccttgtgttgtgtgtattcaactcacagagttgaacgatcctttacacagagcagactagaaacactctttttgtggaatttgcaagtggagatttcagccgctttgaggtcaatagtagaaaaggaaatatcttcgtagaaaaactagacagaatgattctcagaaactcctttgtgatgtgtgtgttcaactcacagaatttaacctttcttttcatagagcagttagtaaacactctgtttataaagtctgcaagtggatattcagacccctttgaagccttcgttggaaacgggatttcttcatattatgctagacagaagaattctcagtaacttcccttgtgttgtgtgtattcaactgacagagttgaactttcatttagagagagcagatttgaaacactgtttttgtggaatttgcaagtggaaatttcaagcgctttggggtcaaaggcagaaaaggaaatatcttcgtataaaaactagacagaatcattctcagaaactgctctgcgatgtgtgcgttcaactctcagagtttaacttttcttttcattcagcagtttggaaacactctgtttgtaaagtctgcaggtggatattttgaccacttagaggccttcgttggaaacgggtattttttcctgtaaggctagaaagaataattcccagtaacttccttgtgttgtgtgcattcaactcacagagttgaacgttcccttagacagagcagatttgaaacactctatttgtgcaatttgcaagtgtagatttcaagcgctttaaggtcaatggcagaaaaggaaatatcttcgtttcaaaactagacagaatcattcccacaaactgcgttgtgatgtgttcgttcaactcacagagtttaacctttctgttcatagagcagttaggaaacactctgtttgtaaagtctgaaagtggatattctgacatcttgtggccttcgttggaaacgggatttcttcatattctgctagacagaagaattctcagtaacttccttgtgttgtgtgtattcaactcacagagttgaacgatcctttacacagagcagacttcaaacattctttttgtggaatttgcaagtggagatttcagccgctttgaggtcaatggtagaaaaggaaactatcttcatataaagactagacagaatgattctcagaaactcctttgtgatgtgtgcgttcaactcacagagtttaacctttcttttcatagagcagttaggaaacactctgtttgtaaagtctggaagtggatattcagacctccttgaggccttcgttggaaacgggatttcttcatattatgcttgacagaagaattcccagtaacttccttgtgttgtgtgtgttcaactcacagagttgaactttcatttacacagagcagatttgaaacactctttttgtggaatttgcaaatggagatttcaagcgctttgaggccaaaggcagaaaaggaaatatcttcgtttcaaaactagacagaatcattctcagaaactgctctgcgatgtgtgcgttcaactctcagagtttaacttttctttccattctgcagtttggaaacactctggttgtaaagtctgcacgtggataacttgaccacttagaggccttcgttggaaacgggtttttttcctgtaaggctagacagaagaattcccagtaacttccttgtgttgtgtgcattcaactcacagagttgaacgttcccttagacagagcagatttggaacactctatttgtgcaatttgcaagtgtagatttcaagcgctttatggtcaacggcagaaaaggaaatatcttcgtttcaaaactagacagaatcactcccacaaactgcgttgtgatgtgttcgttcaactcacagagtttaacctttctgttcatagagcagttaggaaacactctgtttgtaaagtctgcaagtgaatattcagacctccttgaggccttcgttggaaacgggatttcttcatattctgctagaccgaataattctcagtaacttccttgtgttgtgtgtattcaactcacagagttgaacgatcctttacacagagcagatttgaaacactctttttgtggaatttgcaagtggagatttcagccgctttgaggtcaatggtagaaaaggaaactaccttcatataaagactagacagaatgattctcagaaactcctttgtgatgtgtgtgttcaactcacagagtttaacctttcttttcatagagcagttagtaaacactctgtttataaagtctgcacgtggatattttgaccacttagaggccttcgttggaaacgggtttttttcatgtaaggctagacagaagaattcccagtaacttccttgtgttgtgtgtgttcgactcacagagttgaactttcatttacacagagcagatatgaaacactctttttgtggaatttgcaagtggagatttcaagcgctttgaggccaaaggcagaaaaggaaatatcttcgtttcaaaactagacagaatcattctcagaaactgctgtgtgatgtgtgcgttcaactctcaaagtttaacttttcttttcattcagcggtttggaaacactctgtttgtaaagtctgcacgtggatattttgaccacttagaggccttcgttggaaacgggattttttcatgtaaggctagacagaagaattcccagtaacttccttgtgttgtgtgcattcaactcacagagttgaacgttcccttagacagagcagatttgaaacactctatttgtgcaatttgcaagtgtagatttcaagcgctttaaggtcaatggcagaaaaggaaatatcttcgtttcaaaactagacagaatcattcccacaaactgcgttgtgatgtgttcgttcaactcacagagtttaacctttctgttcatagagcagttaggaaacactgtgtttgtaaagtctgtaagtggatattctgacatcttgtggccttcgttggaaaagggatttcttcatattctgctagacagaagaattctcagtaacttccttgtgttgtgtgtattcaactcacagagttgaacgatcctttacagagagcagactttaaggactctttttgtggaatttgcaagtggagatttcagccgctttgaggtcaatggtagaaaaggaaatatcttcgtataaagactagacagaatgattctcagaaactcctttgtgatgtgtgtgttcaactcacagagtttaacatttcttttcatagagcagttaggaaacactctgtttgtaaagtctccaagtggatattcagacctctttgaggccttcgttggaaacgggtttttttcatataaggctagacagaagaattcccagtaacttccttgtgttgtgtgtgttcaactcacagagttgaactttcatttacacagagcagatttgaaacactctttttgtggaatttgcaagtggagatttcaagcgctttgaggccaaaggcagaaaaggaaatatcttcgtttcgaaactagacagaatcattctcagaaactgctctgcgatgtgtgcgttcaactctcagagtttaacttttcttttcattcagcagtttggaaacactctgtttgtaaagtctgcacgtggatattttgaccacttagaggccttcgttggaaacgggtttttttcctgtaagggtagacagaagaattcccagtaacttccttgtgttgtgtgcattcaactcacagagttgaacgttcccttagacagagcagatttgaaacactctatttgtgtaatttgcaagtgtacatttcaagcgctttaaggtcaacggcagaaaaggaaatatcttcgtttcaaaactagacagaatcattcccacaaactgcgttgtgatgtgttcgttcaactcacagagtttaacttttccgttcatagagcagttaggaaacactctgtttgtaaagtctgcaagtggatattcagacctccttgaggccttcgttggaaatgggatttcttcatattctgctagacagaagaattctcagtaacttcccttgtgttgtgtgtattcaactcacacagttgaacgatcctttacacagagcagacttgtaacactctttttgtggaatttgcaagtggagatttcagccgctttgaagtcaaaggtagaaaaggaaatatcttcctataaaaactagacagaatgattctcagaaactcctttgtgatgtgtgcgttcaactcacagagtttaacctttcttttcatagagcagttaggaaacactctgtttgtaaagtctgcaagtggatattcagacctcctttaggacttcgttggaaacgggatttcttcatattatgctagacagaaagaattcccagtaacttccttgtgttgtgtgtgttcaactcacagagttgaactttcatttacacagagcagatttgaaacactctttttgtggaatttgcaagtggagatttcaagcgctttgaggccaaaggcagaaaaggaaatatcttcgtttcaaaactagacagaatcattctcagaaactgctgcgtgatgtgtgcgttcaactctcagagtttaacttttcttttcattcagcggtttggaaacactctgtttgtaaagactgcacgtggatattttgaccacttagaggccttcgttggaaacgggttttttttcatgtaaggctagacagaagaattcccagtaacttccttgtgttgtgtgcattcaactcacagagttgaacgttcccttagacagagcagatttgaaacactctatttgtgcaatttgcaagtgtagatttcaagcgctttaaggtcagtggcagaaaaggaaatatcttcgtttcaaaactagacagagtgattctcagaaactcctttgggatgtctgcgttcaactcacagagtttaacctttcttttcatagagcagttaggaaacactctgtttgtaaagtctgcaagtgcatattcagacctccttgaggccttcgttggaaacgggatttcttcatattctgctatacagaagaattctcagaaacttccttgtgttgtgtgtattcaactcacagagttgaacgatcgtttacacagagcagacttgagaaactctttttgtggaatttgcaagtggagatttcagccgctttgaggtcaatggtagaaaaggaaatatcttcatataaaaactagacagaatgattctcataaactcctttgtgatgtgtgcgttcaactcacagagtttaacttttcttttcatagagcagttaggaaacactctgtttgtaaagtctgcaagtggatattcagacctctttggggccttcgttggaaacgggatttcttcatattctgctagacagaataattctcagtaacttccttgtgttgtgtgtattcaactcacagagttgaacgatcctttacagagagcagacttgaaacactctttttgtggaatttgcaagtggaaattgcagccgctttgaggtcaatggtagaaaaggaaatatcttcctatagaaactagacagaatcattctcagaaactgctgcgtgatgtgtgcgttcaactctcagagtttaacttttcttttcattcagcggtttggaaacactctgtttgtaaagtctgcacgtggaaattttgaccacttagaggccttcgttggaatcgggtttttttcatgtaaggctagacagaagaattcccagtaacttccttgtgttgtgtgcattcaactcacagagttgaacgttcccttagacagagcagatttgaaacactctatttgtgcaatttgcaagtgtagatttcaagcgctttaaggtcaatggcagaaaaggaaataacttcgtttcaaaactagacagaatcattcccacaaactgccttgtgatgtgttcgttcaactcacagagtttaacctttctattcatagagcagttaggaaacactctgtaacgtctgtaagtggatattctgacatcttgtggccttcgttggaaacgggatttcttcatattctgctagacagaagaattctcagtaacttccttgtgttgtgtgtattcaactcacagagttgaaggatcctttacagagagcaggcttcaaacactctttttgtcgaatttgcaagtggagatttcagccgctttgaggtcaatggtagaataggaaatatcttcgtataaagaatagacagaatgattctcagaaactcctttgtgatgtgtgcgttcaactcacagagtttaacctttcttttcatagagcagttaggaaacactctgtttgtaaagtctgcaagtggatattcagacctctttgaggccttcgttggaaacgggtttttttcatataaggcgagacagaagaattctcagtaacttccttgtgttgtgtgtattcaactgacagagttgaactttcatttagagagagcagatttgaaacactctttttgtggaatttgcaagtggagatttcaagcgctttggggccaagggcagaaaaggaaatatcttcgtataaaaactagacagaatcattctcagaaactgctgcgtgatgtgtgcgttcaactctcagagtttaacttttcttttcattcagcggtttggaaacactctgtttgtaaagtctgcacgtggatattttgaccacttagaggcttcgttggaaacgggtttttttcatgtaaggctagacagaagaattcccagtaacttccttgtgttgtgtacattcaactcacagagttgaacgttcccttagacagagcagatttgaaacactctttttgtgcaattggcaaatggagatttcaagcgctttaaggtcaatggcagaaaaggaaatatcttcctttcaaaactagacagaatcattcccacaagctgcgttgtgatgtgttcgttcaactcacagagtttaacctttctgttcatagagcagttaggaaaccctctgtttgtaaagtctgcaagtggatattcagacctctttgaggctttcgttggaaacgggatttcctcatattctgctagacagaagaattctcagtaacttccttgtattgtgtgtattcaactcacagagttgaacgatcctttacacagagcagacttgaaacactctttttgtggaatttgcaagtggagatttcagccgctttgtgatcaatggtagaataggaaatatcttcctatagaaactagacagaatgattctcataaactcctttgtgatgtgtgcgttcaactcacagagtttaacttttcttttcatagagcagttaggaaacactctgtttgtaaagtctgcaagtggatattcagacctccttgaggccttcgttggaaacgggatttcttcatattatgctagacagaagaattcccagtaacttccttgtgttgtgtgtgttcaactcacagagttgaactttcatttacacagagcagatttgaaacactctttttgtggaatttgcaagtggagatttcacgcgctttgaggccaaaggcagaaaaggaaatatcttcgtttgaaaactagacagaatcattctcagaaactgctctgcattgtgtgcgttcaactctcagagtttaacttttcttttcattcagcagtttgaaaacactctgtttgtaaagtctgtacgtggataatttgaccacatagaggccttcgttggaaacgggtttttttcatgtaaggctagacagaagaattcccagtaacttccttgtgttgtggacattcaactcacaaagttgaacgttcccttagacagagcagacttgtaacactctttttgtggaatttgcaagtggagttttcagccgcttttaagtcaatggtagaaaaggtaatatcttccaataaaaactagacagaatcattcccacaaactgcgttgtgatgtgttcgttcaactcacagagtttaacctttctgttcatagagcagttaggaaacactctgtttgtaaagtctgcaagtggatattcagacctctttgaagccttcgttggaaacgggatttcttcatattctgctagacagaagaattctcagtaacttccttgtgttgtgtgtattcaactcacagagttgaacgatcctttacacagagcagacttgaaacactttttttgtggaatttgcaagtggaggtttcagccgctttgaggtcaatagtagaaaaggaaatatcttcgtagaaaaagtagacagaatgattctcagaaactcctttgtgatgtgtgcgttcaactcacagagtttaacctttcttttcatagagcagttaggaaacactctgtttgtaaagtctgcaagtggatattcagacctccttgaggccttcgttggaaacggtatttcttcatattctgctagacagaagaattcccagtaactttccttgtgttgtgtgtgttcaactcacagagttgaactttcatttacacagagcagatttgaaacactctttttgtggaatttgcaagtggagatttcaagcgctttgaggccaaaggcagaaaaggaaatagtcttcgtttcaaaactagacagaatcactctcagaaactgctctgcgatgtgtgcgttcaactctcagagtttaacttttcttttcattcagcagtttggaaacactctgtttgtaaagtctgcacgtggatattttgaccactcagaggccttcgttggaaacgggtttttttcctgtaaggctagacagaagaattcccagtaacttccttgtgttgtgtacattcaactcacagagttgaacgttcccttagacagagcagatttgaaacactctttttgtgcaattggcaagtggagatttcaagagatttaaggtcaatggcagaaaaggaaatatcttcgtttcaaaactagacagaatcattcccacaaactgcgttgtgatgtgttcgttcaactcacagagtttaacctttctgttcatagagcagttaggaaacactctgtttgtaaagtctgtaagtggatattctgacatcttgtggccttcgttggaaaggggatttcttcatattccgctagacagaagaattctcagtaacttccttgtgttgtgtgtattcaactcacagtagttgaacgaccctttacacagagcagacttgtaacactctttttgtggaatttgcaagtggagatttcagccactttgaagtcaaaggtagaaaaggaaataacttcctataaaaactagacagaatgattctcagaaactcctttgtgatgtctgcgttcaactcacagagtttaacctttcttttcatagagcagttaggaaacactctgtttgtaaagtctgcaagtggatattcagacctccttgaggccttcgttggaaacgggatttcttcatattctgctatacagaagaattcccagtaacttccttgtgttgtgtgtgttcaactcacagagttgaactttcatttacacagagcagatttgaaacactctttttgtggaatttgcaagtggagatttcaagcgctttgaggccaaaggcagaaaaggaaatatcttcgtatataaactagacagaatcattctcagaaactgctctgtgatgtgtgcgttcaactctcagagtttaacttttcttttcattcagcagtttggaaacactctgtttgtaaagtctgcacgtggataatttgatcacttagaggccttcgttggaaacgggtttttttcatgtaaggctagacagaagaattcccagtaacttccttgtgttgtgtgcattcaactcacagagttgaacgttcccttagacagagcagatttgaaacactctatttgtgcaatttgcaagtgtagatttcaagcgcattaaggtcaatggcagaaaaggaaatatcttcgtttcaaaattagacagaatcattcccacaaactgcgttgtgatgtgttcgttcaactcacagagtttaacctttctgttcatagagcagttaagaaacactctgtttgtaaagtctgcaagtggatattcagacctccttgaggccttcgttggaaacgggatttcttcatattctgctagacagaagaattctcagaaacttccttgtgttgtgtgttttcaactcacagagttgaacgatcctttacacagagcagacttgaaacactccttttgtggaatttgcaagtggagatttcagccgctttgaggtcaatgatagaataggaaatatcttcctatagaaagtagacagagaacgattctcagaaactcctttgtgatgtgtgcgttgaactcacagagtttaacctttcttttcatagagcagttaggaaacactctgtttgtaaagtctgcaagtggatattcagacctctttgaggccttcgttggaaacgggatttcttcatattctgctagacagaagaatccccagtaacttccttgtgttgtgtgtgttcaactcacagagttgaactttgatttacacagagcagatttgaaacactctttttgtggaatttgcaagtggagatttcaagcgctttgaggccaaaggcagaaaaggaaatatcttcgtataaaaactagacagaatcatgctcagaaactgctctgcgatgtgtgcgttcaactctcagagtttaacttttcttttcattcagcagtttggaaacactctgtttgtaaagtctgcacgtggataacttgaccacttagaggccttcgttggaaacgggtttttttcatgtaaggctagacagaagaattcccagtaacttccttgtgttgtgtgcattcaactcatagagttgaacgttcccttagacagagcagatttgaaacactctatttgtgcaatttgcaagtgtagttttcaagctctttaaggtcaacggcagaaaaggaaatatcttggtttcaaaactagacagaatcattcccacaaactgcgttgtgatgtgttcgttcaactcacagagtttaacctttcttttcatagaacagttaggaaacagtctgtttgtaaattctgtaagtggatattctgacatcttgtgaccttcgttggaaacgggatttcttcatattctgctagacagaagaattctcagaatcttccttgtgttgtgtgtattcaacccacagtagttgaacgatagtttacacagagcagatttgaaacactcatttggtggaatttgcaagtggagatttcagccgctttgaggtcaatggtagaaaaggaaatatcttcgtataacaactagacagaatgattctcagaaacttctttgtgatgtgtgtgttcaactcacagagtttaacctttcttttcatagagcagttaggaaacactgtgtttttaaactctgcaagtggatattcagacctctttgaggccttcgttggaaacgggtttcttcatactgtgctagacagaagaattcccagtaacttccttgtgttgtgtgtgttcaactcacagagttgaactttcatttacacagagcagatttgaaacactctttttgtggaatttgcaagtggagatttcaagagctttgaggccaaaggcagaaaaggaaatatcttcgtataaaaactagacagaatgattctcagaaactgctctgcgatgtgtgcgttcaactcccagagtttaacttttcttttcattcagcagtttggaaacactctgtttgtaaagtctgcacgtggataacttgaccacttagaggccttcgttggaaacgggtttttttcatgtaaggctagacagaagaattcccagtaacttccttgtgttgggtgcattcaactcacagagttgaacgttcccttagacagagcagatttgaaacagcctatttgtgcaatttgcaagtgtagatttcaagcgctttaaggtcaacggcaggaaaggaaatatcttcctttcaaaactagacagaatcattctcagaaactgctctgcgatgtgtgcgttcaactctcagagtttaactttgcttttcattcagcagtttggaaacactctgtttctaaagtctgcacgtggataatttgaccacttagaggccttcgttggaaacgggtttttttcatgtaaggctagacagaagaattctcagtaacttccttgtgttgtgtgtattcaactcacagagttgaacgatcctttacacagagcagacttgtaacactctttttgtggaatttgcaagtggagatttcagccgctttgaagtcaaaggtagaaaaggaaatatcttcctataaaaactacacagaatgattctcagaaactcctttgtgatgtgtgcgttcaactcacagagtttaaccttccttttcatagtgcagttaggaaacactctgtttgtaaagtctgcaagtggatattcagacctctttgaggccttcgttggaaacgggtttttttcatataaggctagacagaagaattcccagtaacttccttgtgttgtgtgtgttcaactcacagagttgaactttcatttacacagagcagatttgaaacactctttttctggaatttgcaaatggagatttcaagggatttgaggccaaaggcagaaatggaaatatcttcgtataaaaactagacagaatcattctcagaaactgctgcgtgatgtgtgcgttcaactctcagagtttaacttttcttttcattcagcggtttggaaacactctgtttgtaaagtctgcacgtggacattttgaccacttagaggccttcgttggaaacgggtttttttcatgtaaggctagacagaagaattcccagtaacttgccttgtgttgtgtacattcaactcacagagttgaacgttcccttagacagagcagatttgaaacactctttttgtgcaattggcaaatggagatttcaagcgctttaaggtcaatggcagaaaaggaaattgttcgtttcaaaactagacagaatgattctcagaaactcctttgtgatgtgtgcgttcaactcacagagtttaacctttctgttcatagagcagttaggaaacactctgtttgtaaagtctgcaagtggatattcagaccaccttgaggccttcggtggaaacgggatttcttcatattctgctagacagaagaattctcagtaacttccttgtgttgtgtgtattcaactcacagagttgaacgatcctttacacagagcagagttgaaacactctttttgtggaatttgcaagtggagatttcagccgctttgaggtcaatggtagaaaaggaaatatcttcgtataaagactagacagagtgtttctcagaaactcctttgtgatgtctgcgttcaactcacagagtttaacctttcttttcatagagcagttaggaaacactctgtttgtaaagtctgcaagtggatattcagacctccttgaggccttcgttggaaacgggatttcttcatattctgctatacagaagaattctcagaaacttccttctattgtgtgtattcaactcacagagttgaacgatcgtttacacagagcagactagagacactctttttgtggaatttgtaagtggagatttcagccgctttgaggtcaatggtagaaaaggaaatatcttcgtataaaaactagacagaatcattctcagaaactgctctgcgatgtgtgcgttcaactctcagagtttaacttttcttttcattcagcagtttggaaacactctgtttgtaaagtctgcacgtggataacttgaccacttagaggccttcgttggaaacgggtttttttcatgtaacgctagacagaagaattcccagtaacttccttgtgttgtgtacattcaactcacagagttgaacgttcccttagacagagcagatttgaaacactctttttgtgcaattggcaaatggagatttcaagcgctttaaggtcaatggcagaaaaggaaatatcttcgtttcaaaactagacagaatcattcccacaaactgcgttgtgatgtgttcgttcaactcacagagtttaacctttcttttcatagagcagttaggaaacagtctgtttgaaaattctgtaagtggatattctgacatccttgtggccttcgttggaaacgggatttcttcatattctgctagacagaagaattctcagtaacttccttgtgttgtgtgtattcaactcacagagttgaacgatcctttacacagagcatacttgaaacactcttgttgtggaatttgcaagtggagatttcagccgctttgaggtcaatggtagaataggaaacatcttcctatagaaactagacagaatgattctcagaaactcccttgtgatgtgtgcgttcaactcacagagtttaacctttcttttcatagagcagttaggaaacactctgtttgtaaagtctgcaagtggatattcagacctctttgaggccttcgttggaaacgggatttcttcatattatgctagacagaagaattctcagtaacttccttgtgttgtgtgttttcaactcacagagttcaacgatcctttacatagagtagacttgaaacactctttttgtggaattggcaagtggagatttcagccgctttgaggtcaatggtagaaaaggaaatatcttcgtataaaaaatagacagaaatgattctcagaaactcctttgtgatgtctgcgttcaactcacagagtttaacctttcttttcatagagcagttaggaaacactctgtttgtaaagtctgcaagtggatattcagacatccttgaggccttcgttggaaacgggatttcttcatgttctgctagacagaagaattcccagtaacttccttgtgttgtgtgtgttcaactcacagagatgaactctcatttacacagagcagatttgaaacactctttttgtggaatttgcaaatggagatttcaagcgctttgaggccaaaggcagaagaggaaatatcttcgtataaaaactagacagaatcattctcagaaacagctctgcgatgtgtgcgttcaactctcagagtttaacttttcttttcattcagcagtttggaaacactctgtttgtaaagtctgcacgtacataatttcaccacttagaggccttcgttggaaacaggtttttttcatgtaaggctagacagaagaattctcagtaacttccttgtgttgtgtgtattcaactcacagagttgaacgatcctttacacagagcagacttgaaacactctatttgtagaatttgcaagtggagatttcagctgctttgaggtcaatagtagaaaaggaaatatcttcgtagaaaaactagacagaaagattctcagaaactcctttgtgatgtgtgcgttcaactcacagagtttaacctttcttttcatagagcagttaggaaacactctgtttgtaaagtctgcaagtggatattaagacctccttgaggccttcgttggaaacgggatttcttcatattctgctagacagaagaattctcagtaacttccttgtgttctgtgtattcaactgacagagttgaactttcatttagagagagcagatttgaaacactgtttttgtggaatttgcaagtggagatttcaagcgctttggggccaaaggcaaaaaaggaaatatcttcgtataaaaactagacagaatgattctcagaaactcctttgtgatgtgtgcgttcaactcacagagtttaacctttcttttcatagagcagttaggaaacactctgtttgtaaagtctgcacgtggatattttgaccacttagaggccttcgttggaaacgggtttttttcctgtaaggctagacagaagaattcccagtaacttccttgtgttgtgtacattcaactcacagagttgaacgttcccttagacagagcagatttgaaacactctttttgtgcaattggcaaatggagatttcaagcgctttaaggtcaatggcagaaaaggaaatatcttcgtttcaaaactagacagaatgattctcagaaactcttttgtgatgtgtgcgttcaactcacagagtttaacttttcttttcatagagcagttaggaaacactctgtttgtaaagtctgcaagtggatattcagacctccttgtggccttcgttggaaacgggatttcttcatattctgctagacggaagaaatctcagtaacttccttgtgttgtgtgtattcaactcacagagttgaacgatcctttacacagagcagacttgaaacactctttttgtggaatttgcaagtggagatttcagccgctttgaggtcaatggtagaataggaaatatcttcctatagaaactagacagaatgattctcataaactcctttgtgatgtgtgcgttcaactcacagagtttaacgtttcttttcatagagcagttaggaaaaactctgtttgtaaagtctgcaagtggatattcagacctctttgaggccttcgttggaaacgggatttcttcatattatgctagacagaacaattctcagtaacttccttgtgttgtgtgtattcaactcacagagttgaacgatcctttacacagagcagacttgaaacactctttttgtggaatttgcaagtggagatttcagccgctttgaggtcaatggtagaaaaggaaactatcttcgtataaagactagacagaatcattctcagaaactgctgcgtgatgtgtgcgttcaactctcagagtttaacttttcttttcattcagcggtttggaaacacgctgtttgtaaagtctgcacgtggaaattttgaccacttagaggccttcgttggaaacgggtttttttcatgtaaggctagacagaagaattcccagtaacttccttgtgttgtgtgcattcaactcacagagttgaacgttcccttagacagagcagatttgaaacactctatttgtccaatttgcaagtgtagatttcaagcgctttaaggtcaacggcagaaaaggaaatatcttcgtttcaaaactagacagaatcattcccacaaactgcgttgtgatgtgttcgttcaactcacagagtttaacctttctgttcatagagcagttaggaaacactctgtttgtacagtctgtaagtggatattctgacatcttgtggccttcgttggaaactggatttctccatattctactagacagaagaattctcacaatcttccttgtgttgtgtgtattcaactcacagagttgaacgatggtttacacagagaagatttgaaacactctttttgtggaatttgcaagtggagatttcacccgctttgaggtcaatggtagaaaaggaaatatcttcgtataaaaactagacagaatgattctcagaaactcctttgtgatgtgtgcgttcaactcacagagattaacctttcttttcatagagcagttaggaaacactctgtttgtaaagtctgcaagtggatattcagacctctttgaggccttcgttggaaacgggatttcttcatattctgctagacagaagaattcccagtaacttccttgtgttgtgtgtgttcaactcacagagttgaactttcatttacacagagcagatttgaaacactctttttgtggaatttgcaactggagatgtcaagcgctttgaggccaaaggcagaaaaggaaatatcttcgtttcaaaactagacagaatcattctcagaaaatgctctgtgatgtgtgcgttcaactctcagagtttaacttttcttttcattcagcagtttggaaacactctgtttgtaaagtctgcacgtggatattttgaccacttagaggccttcgttggaaacgggtttttttcatgtaagggtagacagaagaattcccagtaacttccttgtgttgtgtgcattcaactcacagagttgaacgttcccttagacacagcagatttggaacactctatttgtgcaatttgcaagtgtagatttcaagcgctttaaggttaacggcagaaaaggaaatatcttcgtttcaaaactagacagaatgattctcagaacctcctttgtgatgtgtgcgttcaactcacagagttgaacctttcttttcatagagcagttaggaaacacactgtttgtaaagtctgcaagtggatattcagacatccttgaggctttcgttggaaacgggatttcttcatattctgctagaaagaagaattctcagtaacttccttgtgttgtgtgtattcaactcacagagttgaacgatcctttacacagagcagacttgaaacactctttttgtggaatttgcaagtggagatttcagccgctttgaggtcaatggaagaataggaaatatcttcctatagaaactagacagaatgattctcagaaactcctttgtgatgtgtgtgttcaactcacagagtttaacctttcttttcatagagcagttagtaaacactctgtttataaagtctgcaagtggatattcagacccctttgaggccttcgttggaaacgggatttcttcatattctgctagacagaagaattctcagtaacttccttgtgttgtgtgtattcaactcacagagttgaaggatcctttacagagagcagccttgaaacactctttttgtcgaatttgcaagtggagatttcagccgctttgaggtcaatggtagaataggaaatatcttattatagaaactagacagaatcattctcagaatctgctgcgtgatgtgtgcgttcaactctcagagtttaacttttcttttcattcagcggtttggaaacactctgtttgtaaagtctgcacgtggatattttgaccacttagaagccttctttggaaacgggttttcttcatgtaaggctagacagaagaattcccagtaacttccttgtgttgtgtgcattcaactcacagagttgaacgttcacttagacagagcagatttgaaacactctatttgtgcaatttgcaagtgtagatttcaagcgctttaaggtcaatggcagaaaaggaaatttcttcgtttcaaaactagacagaaatcattctcagaaactgctctgcgatgtgtgcgttcaactctcagagtttaactttgcttttcattcagcagtttggaaacactctgtttgtaaagtctgcacgtggataatttgaccacttagaggccttcgttggaaacgggtttttttcatgtaaggctagacagaagaattctcagtaacttccttgtgttgtgtgtattcaactcacagagttgaacgatcctttacacagagcagacttggaacactctttttgtggaatttgcaagtggagatttcagccgctttgaagtcaaaggtagaaaaggaaatatcttcctataaaaactagacagaatgattctgagaaactcctttgtgatgtgtgcgttcaactcacagagtttatcctttcttttcatagagcagttaggaaacactctgtttgtgaagtctgcaagtggatattcagacctctttgaggccttcgttggaaacgggatttcttcatattctgctagacagaagaattcccagtaacttccttgtgttgtgtgtgttcaactcacagagttgaactttcatttacacagagcagatttgaaacactctttttgtggaatttgcaattggagatttcaagcgctttgaggccaaaggcagaaaaggaaatatcttcggtataaaaactagacagaatcattctcagaaactgctctgcgatgtgtgcgttcaactctcagagtttaactttgcttttcattcagcagtttggaaacactctgtttgtaaagtcttcacgtggatattttgaccacttagaggccttcgttggaaacgggtttctttcctgtaaggctagacagaagaattcccagtaacttccttgtgttgtgtacggttcaactcacagagttgaacgttcccttagacagagcagatttgaaacactctttttgtgcaattggcaagtggagatttcaagcgctttaaggtcaatggcagaaaaggaaatatcttcgtttcaaaactagacagaatcattcccacaaactgcgttgtgatgtgttcgttcaactcacagactttaacctttcttttcatagagcagttaggaaacagtctgtttgtaaattctgtaagtggatattctgacatacttgtggccttcgttggaaacgggatttcttcatattctgctagacagaagaattctcagtaacttccttgtgttgtgtgtattcaactcacagagttgaacgatcctttacacagagcagacttgaaacactctttttgtggaatttgcaagtggagatttcagccgctttgaggtcaatggtagaataggaaatatcatcctatagaaactagacagaatgattctcagaaactcctttgtgatgtgggcgttcaactcacagagtttaaccattcttttcatagagcagttaggaaacactctgtttgtaaagtatgcatgtggatatttggacttctttgaggccttcgttggaaacgggtttttttcatgtaaggctagacagaagaattctcagtaacttccttgtgttgtgtgtattcaactcacagagttgaacgatcctatacacagagcagacttgaaacactctttttgtggaatttgcaagtggagatttcagccgctttgaggtcaatggtagaataggaaatatcttcctatagaaactagacagaatcattctcagaaactgctgcgtgatgtgtgcgttcaactctcagagtttaacttttcttttcattcagcggtttggaaacactctttttgtaagtctgcacgtggatattttgaccacttagaggccttcgttggaaacgggtttttttcatgtaaggctagacagaagaattcccagtaacttccttgtgttgtgtacattcaactcacagagttgaacgttcccttagacagagcagatttgaaacactctttttgtgcaattggcaaatggagatttcaagcgctttaagttcaatggcagaaaaggaaatatcttcgtttcaaaactagacagaatcattcccacaaactgcgttgtgatgtgttcgttcaactcacagagtttaacctttctgttcatagagcagttaggaaacactctgtttgtaaagtctgaaagtggatattctgacatcttgtggccttcgttggaaacgggatttcttcatattctgctagacagaagaattgtcagtaacttccttgtgttgtgtgtattcaactcacagagttgaacgatcctttacacagagcagacttgaaacactctttttgtggaatttgcaagtggagatttcagccgctttgagttcaatggtagaataggaaatatcttcctatagaaactagacagaacgattctcaaaaactcctttgtgatgtgtgcgttcaactcacagagtttaacctttcttttcatagagcagttaggaaacactctgtttataaagtctgcaagtggatattcagacccctttgaggccttcgttggaaacgggatttcttcatattatgctagacagaagaattctcagtaacttccttgtgttgtgtgtattcaactgacagagttgaactttcatttagagagagcagatttgaaacactgtttttgtggaatttgcaagtggagatttcaagcgccttggggccaaaggcagaaaaggaaatatcttcgtataaaaactagacagaatcattctcagaaactgctctgcgatgtgtgcgttcaactctcagagtttaacttttcttttcattcagcagtttggaaacactctgtttgtaaagtctgcacgtggataatttgaccacttagagaccttcgttggaaacgggtttttttcatggaaggctagacagaagaattcccagtaacttccttgtgttgtgtacattcaactcacagagttgaaagttcccttagacagagcagatttgaaacactctttttgtgcaattggcaaatggagatttcaagcgctttaatgtcaatggcagaaaaggaaatatcttcgtttcaaaactagacagaatcattcccacaaactgcgttgtgatgtgttcgttcaactcacagagtttaacctttcttttcatagagcagttaggaaacagtctgtttgtaaattctgtaagtggatattctgacattttgtggccttcgttggaaacgggatttcttcatattctgctagacagaagaattctcagtaacttccttgtgttgtgtgtattcaactcacagagttgaacgatcctttacacagagcagacttgtaacactctttttgtggaatttgcaagtggagatttcagccgctttgaggtcaacggtagaaaaggaaatctcttcgtataaaaactagacagaatgattctcagaaacttctttgtgatgtgtgtgttcaactcacagagtttaacctttcttttcatagagcagttaggaaacactctgcctgtaaagtctgcaagtggatattcagacctcgttgaggccttcgttggaaacgggatttcttcatattctgctagacagaagaattctcagtaacttccttgtgttgtgtgtattcaactgacagagttgaactttcatttagagagagcagatttgaaacactgtttttgtggaatttgcaagtggagatttcaagcgctttggggccaaaggcagaaaaggatatatcttcgtataaaaactagacagaatcattctcagaaactgctgcgtgatgtgtgcgttcaactctcagagtttaaagtttcttttcattcagcggtttggaaacactctgtttgtaaagtctgcaagtggatattcagacctcttggaggctttcgttggaaacgggatttcttcatattctgctagacagaagtaattcccagtaacttccttgtgttgtgtgcattcaactcacagagttgaacgttcccttagacagagcagatttgaaacactctatttgtgcaatttgcaagtgtagatttcaagcgctttaaggtcaatggcagaaaaggaaatatcttcgtttcaaaactagacagaatcattcccacaaactgcgttgtgatgtgttcgttgaactcacagagtttaacctttcttttcatagagcagttaggaaacagtctgtttgtcaattctgtaagtggatattctgacatcttgtggccttcgttggaaacgggatttcttcatattctgctagacagaagaattctcagtaacttccttgtgttgtgtgtattcaactcacagagttgaacgatcttttacacagagcagacttgaaacactctttttgtggaatttgcaagtggagatttcagccgctttgaggtcaatggtagaaaaggaaatatcttcgtataaagactagacagaatgattcttagaaactcctttgtgatgtgtgcgttcaactcacagagtttaacctttctgttcatagagcagttaggaaacactctgtttgtaaagtctgcaagtggatattcagacctcctttaggccttcgttggaaacgggatttcttcatattctgctagacagaagaattctcagtaacttccttgtgttgtgtgtattcaactcacagagttgaactatcctttacacagagcagacttgaaacactctttttgtggaatttgcaagtggagatttcagccgctttgaggtcaatggtagaaaaggaaatatcttcgtataaaaactagacagaatcattctcagaaactgctctgtgatgtgtgcgttcaactctcagagtttaccttttcttttcattcagcagtttggaaacactctgtttgtaaagtctgcacgtggataatttgaccacttagaggccttcgttggaaacgggtttttttcatgtaaggctagacagaagaattcccagtaacttccttgtgttgtgtgcattcaactcacagagttgaacgttcccttagacagagcagatttgaaacactctatttgtgcaatttgcaagtgtagatatcaagcgctttaaggtcaatggcagaaaaggaaatgtcttagtttcaaaactagacagaatgattctcagaaacttctttgtgatgtgtgcgttcaactcacagagtttaacctttcttttcatagagcagttaggaaacactctgtttgtaaactctgcaagtggatattcagacctcttggaggccttcgttggaaacgggatttcttcatagtatgctagacagaagaattctcagtaacttccttgtgttgtgtgtattcaactcacagagttgaaagatcctttacacagagcagacttgaaacactctttttgtggaatttgcaagtggagatttcagccgctttgaggtcaatagtagaaaaggaaatatcttcgtagaaaaactagacagaatgattctcagaaactcctttgtgatgtgtgcgttcaactcacacagtttaacctttcttttcatagagcagttgggaaacactctgtttgtaaagtctgcaagttgatattcagacctctttgaggccttcgtttgaaacgggatttcttcatattctgctagaaagaagaattctcagtaacttccttgtgttgtgtgtattcaactgacagagttcaactttcacttagagagagcagatttgtaacactgtttttgtggaatttgcaagtggagatttcaagcgctttggggccaaaggcagaaaacgaaatatcttcgtataaaaactagacagaatcattctcagaaaatcctctgtgatgtgtgggttcaactctcagagtttaacttttcttttcattcagcagtttggaaacactctgtttgtaaagtctgcacgtggatattttgaccacttagaggccttcgttggaaacgggtttttttcatgtaagggtagacagaagaattcccagtaacttccttgtgttgtgtgcattcaactcacagagttgaacgttcccttagacagagcagatttgaatcactctatttgtgcaatttgcaagtgtagatttcaagcgatttaaggtcaatggcagaaaaggaaatatcttcgtttcaaaactagacagaaatcattcccacaaactgcgttgtgatgtgttcgttcaactcacagagtttaacctttctgttcatagagcagttaggaaacactctgtttgtaaagtctgtaagtggatattctgacatcttgtggccttcgttggaaacgggatttcttcatattctgctagacagaagaattctcagtaacttccttgtgttgtgtgtattcaactcacagagttgaacgatcctttacacagagcagacttgaaacactcttcttgtggaatttgcaagtggagatttcagccgctttgaggtcaatggtagaaaagtaaatatcttcgtataaagactagacagaatgattctcagaaactcctttgtgatgtgtgcgttcaactcacagagtttaacctttcttttcatagagcagttaggaaacactctgcttgtaaagtctgcaagtggatattcagacctctttgaggccttcgttggaaacgggtttttttcatataaggctacacagaagaattcccagtaacttccttgtgttgtgtgtgttcaactcacagagttgaactttcatttacacagagcagatttgaaacactctttttgtggaatttgcaagtggagatttcaagggctttgaggccaaaggcagaaaaggaaatatcttcgtataaaaactagacagaatcattctcagaaactgctctgcgatgtgtgcgttcaactctcagagtttaacttttcttttcattcagcagtttggaaacactctgtttctaaagtctgcacgtggataatttgaccacttagaggccttcgttggaaacgggtttttttcctgtaaggctagacagaagaattcccagtaacttccttgtgttgtgtacattcaactcacagagttgaacgttcccttagacagagcagatttgaaacactctttttgtgcaattggcaagtggagatttcaagcgctttaaggtcaatggcagaaaaggaaatatcttcgtttcaaaactagacagaatcattcccacaaactgcgttgtgatgtgttcgttcaactcacagagtttaacctttctgttcatagagcagttaggaaacactctgtttgtaaagtctgcaagtggatattcagacctcctagaggccttcgttggaaacgggatttctccatattctgctagacagaagaattctcagtaacttccttgtgttgtgtgtattcaactcacagagttgaacgatcctttacaaagagcagacttgaaacattctttttgtggaatttgcaagtggagatttcagccgctttgaggtcaatggtagaataggaaatatgttcctatagaaactagacagaatgattctcagaaactccattgtgatgtgtgcgttcaactcaaagagtttaacttttcttttcatagagcagttaggaaacactctgtttgtaaagtctgcaagtggatattcagacccctttgaggccttcgttggaaacgggatttcttcatattatgctagacagaagaattcccagtaacttccttgtgttgtgtgtgttcaactcacagcagttgaactttcatttacacagagcagatttgaaacactctttttgtggaatttgcaagtggagatttcaagcgctgtgaggccaaaggcagaaaaggaaatatcttcgtataaaaactagacagaatcattctcagaaactgctctgcgatgtgtgcgttcaactctcagagtttaacttttcttttcattcagcagtgtggaaacactctgtttgtaaagtctgcacgtggatattttgaccacttataggccttcgttggaaacgggtttttttcctgtaaggctagacagaagaattcccagtaacttccttgtgttgtgtacattcaactcacagagttgaacgttcccttagacagagcagatttgaaacactctttttgtgcaattggcaaatggagatttcaagcgctttaaggtcaatggcagaaaaggaaatatcttcgtttcaaaactagacagaatcattcccacaaactgcgttgtgatgtgttcgttcaactcacagagtttaacctttctgttcatagagcagttaggaaacactctgtttgtaaagtctgtaagtggatattcagacatcttgtggccttcgttggaaacgggatttcttcatattctgctagacagaagaattctcagtaacttccttgtgttgtgtgtatgcaactcacagagttgaacgatcctttacacagagcagacttgaaacactctttttgtggaatttgcaattggagatttcagccgctttgaggtcaatggtagaaaaggaaactatcttcatataaagactagacagaatgattctcagaaactcctttgtgatgtgtgcgttcaactcacagagtttaacctttcttttcatagaccagttaggaaacactctgtaaagtctgcaagtggatattcagacatccttgaggccttcgttggaagcgggatttcttcatattctgctacaaagaagaattcttagtaacttccttgtgttgtgtgtattcaactcacagagttgaacgatcctttacacagagcagacttgaaacattctttttgtggaatttggaagtggagatttcagccgctttgaggtcaatggtagaataggaaatatcttcctatagaaactagacagaatcattctcagaaactgctgcgtgatgtgtgcgttcaactctcagagtttaacttttcttttcattcagcggtttggaaacactctgtttgtaaagtctgcacgtggatattttgaccacttagaggccttcgttggaaacgggtttttttcatgtaaggctcgacagaagaattcccagtaaattccttgtgttgtgtacattcaactcacagagttgaacgttcccttagacagagcagatttgaaacactctttttgtgcaattggcaagtggagatttcaagcgctttaaggtcaatggcagaaaaggaaatatcttcgtttcaaaactggacagaatcattcccacaaactgcgttgtgatgtgttcgttcaactcacagagtttaacctttcttttcatagagcagttaggaaagagtctgtttgtaaattctgtaagtggatattctgacatcttgtggccttcgttggaaacgggatttcttcatattctgctagacagaagaattctcagaaacttccttgtgttgtgtgttttcaactcacagagttgaacgatcctttacacagagcagacttgaaacactctttttgtggaatttgcaagtggagatttcagccgctttgaggtcaatggtagaataggaaatatcttcctatagaaactagacagaacgattctcagaaactcctttgtgatgtgtgcgttcaactcacagagtttaacctttcttttcatagagcagttaggaaacactctgtttgtaaagtctgcaagtggatattcagacctctttgaggccttcgttgtaacgggatttcttcctattctgctagacagaagaattcccagtaacttccatgtgttgtgtgtgttcaactcacagagttgaactttcatttacacagagcagatttgaaacactctttttgtggaatttgcaaatggagatttcaagcgctttgaggccagaggcagaaaaggaaatatcttcgtataaaaactagacagaatcattctcagaaactgctctgcgatgtgtgcgttcaactctcagagtttaacttttcttttcattcagcagtttggaaacactctgtttgtaaagtctgcatgtggataatttgaccacttagaggtcttcgttggaaacgggtttttttcatgtaaggctagacagaagaattcccagtaacttccttgtgttgtgtgcattcaactcacagagttgaacgttcccttagacagagcagatttgaaacactctatttgtgcaatttgcaagtgtagttttcaagctctttaaggtcaacggcagaaaaggaaatatcttggtttcaaaactagacagaatcattcccacaaactgcgttgtgatgtgttcgttcaactcacagagtttaacctttctgttcatagagcagttaggaaacactctgtttgtaaagtctgcaagtggatattcagacctccttgaggccttcggtggaaacgggatttcttcatattctgctagacagaagaattctcagtaacttccttgtgttgtgtgtattcaactcacagagttgaacgatcctttacacagaccagacttgaaacactctttttgtggaatttgcaagtggagatttcagccgctttgaggtcaatggtagaaaaggaaatatcttcgtataaagactagacagaatgattctcagaaactcctttgtgatgtgtgtgttcaactcacagagtttaacctttcttttcatagagcagttaggaaacactctgtttgtaaagtctgcaagtggatattcagacctctttgaggccttcgttggaaacagttttttttcatataaggctagacagaagaattcccagtaacttccttgtgttgtgtgtgttcaactcacagagttgaactttcatttacacagagcagattggaaacactctttttgtggaatttgcaagtggagatttcaagcgctttgaggccaaagacagaaaaggaaatatcttcgtataaaaactagacagaatcattctcagaaactgctctgcgatttgtgcgttcaactctcagagtttaactttgcttttcattcagcagtttggaaacactctgtttgtaaagtctgcacgtggatattttgaccacttagaggccttcgttggaaacgggtttctttcctgtaaggctagacagaagaattctcagtaacttccttgtgttgtgtgtattcaactcacagagttgaacgatcctttacagagagcagacttgaaacactctttttgtggaatttgcaagtggagatttcagccgctttgtggtcaatggtagaataggaaatatcttcctatagaaactagacagaatgattctcagaaactcctttgtgatgtgtgcgttcaactcacagagtttaacctttcttttcatagagcagttaggaaacactctgtttgtaaagtctgcaagtggatattcagacctctttgaggccttcgttggaaacgggatttcttcatgttctgctacacagaagaattctcagtaacttccttgtgttgtgtgtattcaactcacagagttgaacgatcctttacacagagcagacttgaaacactctttttgtagaatttccaagtggagatttcagccgctttgaggtcaatagtggaaaaggaaatatcttcgtagaaaaactagacagaatgattctcagaaacgcctttgtgatgtgtgcgtgcaactcacagagtttaacctttcttttcatagagcagttaggaaacactctgtttgtaaagtctgcaagtggatattcagacctctttgaggccttcgttggaaacgggtttttttcatataaggctagacagaagaattctcagtaacttccttgtgttgtgtgtattcaactgacagagttgaactttcatttagagagagcaggtttgaaacactgtttttgtggaatttgcaagtggagatttcaagcgctttggggccaaaggcagaaaaggaaatatcttcgtataaaaactagacagaatcattctcagaatctgctgcgtgatgtgtgcgttcaactctcagagtttaacttttcttttcattcagcggtttggaaacactctgtttgtaaagtctgcacgtggatattttgaccacttagaggccttcgttggaaacgggtttttttcatgtaaggctagacagaagaattcccagtaacttccttctgttgtgtgcattccactcacagagttgaacgttcccttagacagagcagatttgaaacactctatttgtgcaatttgcaagtgtagatttcaagcgctttaaggtcaatggcagaaaaggaaatatcttcgtttcaaaactagacagaatcattcccacaaactgcgttgtgatgtgttcgttcaactcacagagtttaacctttctgttcatagagcagttaggaaacactctgtttgtaaagtctgtaagtggatattctgacattttttggccttcgttggaaaagggatttcttcatattctcctagacagaagaattctcagtaacttccttgtgttgtgtgtattcaactcacagagttgaacgatcctttacacagagtagacttgaaacactctttttgtggaatttgcaagtggagatttcagccgctttcaggtcaatagtagaaaaggaaatatcttcgtagaaaaactagacagaatgattctcagaaactcctttgtgatgtgtgcgttcaactcacagagtttaacctttcttttcatagcgcagttgggaaacactctgtttgtaaagtctgcaagtggatattcagacctccttgaggctttcgttggaaacgggatttcttcatattctgctagaaagaagaattcccagtaacttccttgtgttgtgtgtgttcaactcacagagttgaactttcatttacacagagcagacttgaaacactctttttgtggaatttgcaagtggagatttcaagcgctttgaggccaaaggcagaaaaggaaatatcttcgtttcaaaactagacagaatcattctcagaaactgctctgcgatgtgtgcgttcaactctcagagtttaacttttcttttcattcagcagtttggaaacactctgtttgtaaagtctgcacgtggatattttgaccacttagaggccttcattggaaacgggtttttttcctgtaaggctagacagaagaattcccagtaacttccttgtgttgtgtgcattcaactcacagagttgaacgttcccttagacagagcagatttgaaacactctatttgtgcaatttgcaagtgtagttttcaagcgctttaaggtcaacggcagaaaaggaaattcttcgtttcaaaactagacagaatgattctcagaaactcctttgtgatgtgtgcgttcaactcacagagttcaacctttcttttaatagagcagttgggaaacactctgtttgtaaagtctgcaagtggatattcagacctccttgaggccttcgttggaaacgggatttcttcatattatgctagacagaataattctcagtaacttccttgtgttgtgtgtattcaactcacagagttgaacgatcctttacacagagcagacttgaaacattctttttgtggaatttgctagtggagatttcagccgctttgaggtcaatggtagaataggaaatatcttcctatagaaactagacagaatgattctcagaaactcctttgtgatgtgtgcgttcaactcacagagtttaacctttcttttcatagagtagttaggaaacactctgtttgtaaagtctgcaagtggatattcagacatccttgaggctttcgttggaaacgggatttcttcatattctgttagaaagaagaattcccagtaacttcccttgtgttgtgtgtgttcaactcacagagttgaactttcatttacacagagcagatttgaaacactctttttgtggaatttgcaaatggaggtttcaagcgctttgaggccaaaggcagaaaaggaaatatcttcgtataaaaactagacagaatcattctcagaaactgctgcgtgatgtgtgcgttcaactctcagagtttaacttttcttttcattcagcggtttggaaacactctgtttgtaaagtctgcacgtggatattttgaccacttagaggccttcgttggaaacgggttttttgcatgtaaggctagacagaagaattcccagtaacttccttgtgttgtgtacattcaactcacagagttgaacgttcccttagacagagcagatttgaaacactctttttgtgcaattggcaaatggagatttcaagcgctttaaggtcaatggcagaaaaggaaatattcttcgtttcaaaactagacagaatgattctcagaaaatcttttgtgatgtgtgcgttcaactcacagagtttaacttttcttctcatagagcaggtaggaaacactctgtttgtaaagtctgcaagtggatattcagacctctttgaggccttcgttggaaacgggatttcttcatattatgctagacagaataattctcagaaacttccttgtgttgtgtgtattcaactcacagagttgaaggatcctttacagagagcaggcttgaaacactctttttgtcgaatttgcaagtggagatttcagccgctttgaggtcaatggtagaataggaaatatcttcttatagaaactagacagaatgattctcagaaactcccttgtgatgtgtgcgttcaactcacagagtttaagctttcttttcatagagcagttaggaaacactctgtttgtaaagtctgcaagtggatattcagacctccttgaggccttcgttggaaacaggatttcttcatatgatgctagacagaagaattcccagtaacttccttgtgttgtgtgtgttcaactcacagagttgaactttcatttacccagagcagatttgaaacactctttttgtggaatttgcaagtggagatttcaagcgctttgaggccaaaggcagaaaaggaaatatcttcgtttcaaaactagacagaatcattctcagaaactgctctgcgatgtgtgcgttcaactctcagagtttaacttttcttttcattcagcagtttggaaacactctgtttgtaaagtctgcacgtggatattttgaccacttagaggccttcgttggaaccgggtttttttcctgtaaggctagacagaagaattcccagtaacttccttgtgttgtgtacattcaactcacagagttgaacgttcccttagacagagcagatttgaaacactctttttgtgcaattggcaaatggagatttcaagcgctttaagttcaatggcagaaaaggaaatatcttcgtttcaaaactagacagaatgattctcagaaactcctttgtgatgtgtgcgttcaactcacagagtttaacctttctgttcatagagcagttaggaaacactctgtttgtaaagtctgcaagtggatattcagacctccttgaggctttcgttggaaacgggatttcttcatattctgctagacagaagaattctcagaaacttccttgtgttgtgtgtattcaactcacagagttgaacgatcgtttacacagagcagacttgagacactctttttgtggaatttgtaagtggagattgcagccgctttgaggtcaatggtagaaaagaaaatatcttcatataaaaactagacagaatgattctcagaaactcctttgtgatgtgtgcgttcaactcacagagtttaacttttgttttcatagagcagttaggaaacactctctttgtatagtcttcaagtggatattcagacctctttgaggccttcgttggaaacgggatttcttcatattctgctagacagaagaattcccagtaacttccttgtgttgtgtgtgttcaactcacagagttgaactttcatttacacagagcagatttgaaacactctttttgtggaatttgcaagtggagatttcaagcgctttgagggcaaaggcagaaaaggaaatatcttcgtttcaaaactagacagaatcattctcagaaactgctgcgtgatgtgtgcgttcaactctcagagtttaaattttcttttcattcagcggtttggaaacactctgtttgtaaagtctgcacgtggaaattttgaccacttagaggccttcgttggaaacgggattttttcatgtaaggctagacagaagaattcccagtaacttccttgtgttgtgtgcattcaactcacagagttgaacgttccttagacacagcagatttgaaacactctatttgtgcaatttgcaagtgtagatttcaagcgctttaaggtcaatggcagaaaaggaaatatcttcgtttcaaaactagacagaatgattctcagaaactcctttgtgatgtgtgtgttcaactcacagagtttaacttttcttctcatagagcagttaggaaacactctgtttgtaaagtctgtaagtggatattctgacatcttgtggccatcgttggaaacgggatttcttcatattctgctagacagaagaattctcagtaactttccttgtgttgtgtgtattcaactcacagagttgaacgatcctttacacagagcagacttgaaacactctttttgtggaatttgcaagtggagatttcagccgctttgaggtcaatggtagaaaaggaaactatcttcatataaagactagacagaatgattctcagaaactcctttgtgatgtgtgcgttcaactcacagagtttaacctttcttttcatagagcagttaggaaacactctgtttgtaaagtctacaagtggatattcagacctccttgaggccttcgttggaaacgggatttcttcatattatgctagacagaataattctcagtaacttccttgtgttgtgtgtattcaactcacagagttgaaggatcctttacagagagcaggcttgaaatactctttttgtcgaatttgcaagtggagatttcagccgctttgaggtcaatggtagaataggaaatatcttcttatagaaactagacagaatcattctcagaaactgctgcgtgatgtgtgcgttcaactctcagagtttaacttttcttttcattcagcggtttggaaacactctgtttgtaaagtctgcacgtgggtattttgaccacttagaggccttcgttggaaacgggtttttttcatgtaaggctagacagaagaattcccagtaacttccttgtgttgtgtgcattcaactcacagagttgaacgttcccttagacagagcagatttgaaacactctatttgtgcaatttgcaagtgtagatttcaagcgctttaaggtcaatggcagaaaaggaaatatcttcgtttcaaaactagacagaatgattctcagaaaatcctttgtgatgtgtgcgttcaactcacagagtttaacttttcatatagcagttaggaaacactttgtttgtaaagtctgcaagtggatattcagacctctttgaggcattcgttggaaacgggatttcttcatattctgctagacagaagaattctcagaaacttccttgtgttgtgtgtattcaactcagagagttgaacgatcctttacacagagcagacttgaaacacactttttttggtattttcaagtggagatttcagccactttgaggtcaatggtagaaaaggaaatatcttcgtataaaaactagacagaatgattctcagaaactcctttgtgatgtgtgcgttcaactcacagagtttaacttttcttttcatagagcagttaggaaacactctgtaaagtctgcaagtgcatattcagacctctttgaggccttcgttggaaacgggatttcttcatattatgctagacagaataattctcagtaacttccttatgttgtgtgtattcaactcacagagttgaacgatcctttacaaagagcagacttgaaacactctttttgtggaattcgcaagtggagatttcagccgctttgaggtcaacagtagaaaaggaaatatcttcgtagaaaaactagacagaatcattctcagaaactgctgtgtgatgtgtgctttcaactcagagagtttaacttttcttttcattcagcagtttggaaacactctgtttgtaaagtctgcaagtggatatattgacctcttagggtccttcgttggaaacgggttttttttcatgtaaggctagacagaagaattctcagtaacttccttgtgttgtgtgtattcaactcacagagttgaacgatcctttacactgagcagacttgtaacactctttttgtggaatttgcaagtggagatttcagccgctttgaagtcaaaggtagaaaaggaaatatcttcctataaagactagacagaacgattctcagaaactcctttgtgatgtgtgcgttcaactcacagagtttaacctttcttttcatagagcagttaggaaacactctgtttgtaaagtctgcaagtggatatgcagacctctttgaggccttcgttggaaacgggatttcttcatattctgctagacagaagaattctcagtaacttaccttgtgttgtgtgtattcaactcacagagttcaacgatcctttacacagagcagacttgaaacactctttttgtggaatttgcaagtggagatttcagccgctttgaggtcaatggtagaaaaggaaatatcttcgtataaaaactaaacagaacgattctcagaaactcctttgtgatgtgtgcgttcaactcacagagtttaacctttcttttcatagagcagttaggaaacactctgtttgtaaagtctgcaaatggatattcagacctctttgaggccttcggtggaaacgggatttcttcatattctgctagacagaagaattctcagtaactttccttgtgttgtgtgtattcaactgacagagttgaactttcatttagagagagcagatttgaaacactgtttttgtggaatttgcaagtggtgatttcaagcgctttggggccaaaggcagaaaaggaaatatcttcgtataaaaactagacagaatcattctcagaaactgctgcgtgatgtgtgcgttcaactctcagagtttaacttttcttttcattcagcggtttggaaacactctgtttgtaaagtctgcacgtggaaattttgaccacttagaggccttcgttggaaacgggattttttcatgtagggctagacagaagtattctcagtaacttccttgtgttgtgtgtattcaactcacagagttaaacgatcctttacacagagcagacttgtaacactctttttgtggaatttgcaagtggagatttcagccgctttgaagtcaaaggtagaaaaggaaataacttcctataaaaactagacagaatgattctcagaaacttctttgtgatgtgtgcgttcaactcacagagtttaacatttcttttcatagagcagttaggaaacactctgtttgtaaactctgcaagtggatattcagacctctttgaggccttcgttggaaacgggatttcttcatactgtgctagacagaagaattctcagtaatttccttgtgttgtgtgtattcaactcacagagttcaacgatcctttacacagagcagacttgaaacactctttttgtggaatttgcaagtggagatttcagccgctttgaggtcaatggtagaaaagtaaatatcttcgtataaaaactagacagaatgattctcagaaactcctttgtgatgtgtgcgttcaactcacagagtttaacttttcttttcatagagcagttagtaaacactctgtttataaagtctgcaagtggatattcagacccctctgaggacttcgttggaaacgggatttcttcatattatgctagacagaagaattcccagtaacttccttgtgttgtgtgtgttcaactcacagagttgaactttcatttacacagagcagatttagaacacactttttgtggaatttgcaagtggagatttcaagcgctttgaggccaaaggcagaaaaggaaatatcttcgtataaaaactagacagaataattctcagaaactgctgcgtgatgtgtgcgttcaactctcagagtttaacttttcttttcattcagcagtttggaaacactctgtttgtaaagtctgcacgtggataatttgaccacttagaggtcttcgttggaaacgggtttttttcatgtaaggctagacaaaagaattctcagtaacttccttgtgttgtgtttattcaactcacagagttgaacgatcctttacacagagcagacttgtaacactctttttgtggaatttgcaagtggagatttcagccgctttgaagtcaaaggtagaaaaggaaatatcttcctataaaaactagacagaatgattctgagaaactcctttgtgatgtgtgcgttaaactcacacagtttaacctttcttttcatagagcagttaggaaacactctgtttgtaaagtctgcaagtggatattcagacctccttgaggccttcgttggaaacgggatttcttcatattatgctagacagaagtaattctcagtaacttccttgtgttgtgtgtattcaactcacagagttaaacgatcctttacacagagcagacgtgaaacactctttttgtggaatttggaagtggagatttcagccgctttgaggtcaatggtagaaaaggaaactatcttcatataaagactagacagaatgattctcagaaactcctttgtgatgtgtgcgttcaactcacagagtttaacctttcttttcagagagcagttaggaaacactctgtttgtaaagtctgcaagtggatattcagacatctttgaggctttcgttggaaacgggatttcttcatattctgctagacagaagaattcccagtaacttccttgtgttgtgtgtgttgaactcacagagttgaactttcatttacacagagcagatttgaaacactctttttgtggaatttgcaagtggagatttcaagcgctttgaggccaaaggcagagaaggaaatatcttcgtttgaaaactagacagaatcattctcagaaactgctctgcgatgtgtgcgttcaactctccgagtttaacttttcttttcattcagcagtttgaaaacactctgtttgtaaagtctgcacgtggataatttgaccacttagaggccttcgttggaaacggtttttttttcatgtaaggctagacagaagaattcccagtaacttccttgtgttgtgtacattcaactcacagagttgaacgttcccttagacagagcagatttgaaatactctttttgtgcaattggcaagtggagatttcaagcgctttaaggtcaatggcagaaaaggaaatatcttagtttcaaaactagacagaatcattcccacaaactgcgttgtgatgtgttcgttcaactcacagagtttaacctttcttttcatagagcagttaggaaacactctgtttgtaaagtctgtaagtggatattctgacatcttgtggccttcgttggaaacgggatttcttcatattctgctagacagaagaattctcagtaacttccttgtgttgtgtgtattcaactcacagagttgaacgatcctttacacagagcagacttggaacactctttttgtggaatttgcaagtggagatttcagccgcgttgaagtcaatggtagaaaaggaaatatcttcgtataaaaactagacagaatgattctcagaaactcctttgtgatgtgtgcgttcaactcacagagtttaacttttcttttcatagagcagttaggaaacactctgtttataaagtctgcaagtggatattcagacctctttgtggccttcgttggaaacgggatttcttcatattatactagacagaagaattctcagtaacttccttgtgttgtgtgtattcaactgacaaagttgaactttcatttagagggagcagatttgaaacactgtttttgtggaatttgcaagtggagatttcaagcgctttggggccaaaggcagaaaaggatatatcttcgtataaaaactagacagaatcattctcagaaactgctgcgtgatgtgtgcgttcaactctcagagtttaacttttcttttcattcagcggtttggaaacactctgtttgtgaagtctgcccgtggatattttgaccccttagaggccttcgttggaaacgggtttttttcatgtaaggctagacagaagaattcccagtaacttccttgtgttgtgtacattcaactcacagagttgaacgttccccttagacagagcagatttgaaacactctttttgtgcaattggcaagtggagatttcaagcgctttaaggtcaatggcagaaaaggaaatatcttcgtttcaaaactagacagaatgattctcagaaactactttgtgatgtgtgcgttcaactcacagagtttaacctttcttttcatagagcagttaggaaacactctgtttgtaaagtctgcaagtggatattcagacctccttgaggccttcgttggaaacgggatttcttcatattatgcaagacagaagaattctcagtaacttccttgtgttgtgtgtattcaactcacagagttgaacgatcctttacacagagcagacttgaaacactcttcttgtggaatttgcaagtggagatttcagccgctttgaggtcaatggtagaataggaaatatcttcgtatagaaactagacagaatgattctcagaaactcctttgtgatgtgtgcgttcaactcacagactttaacctttcttttcatagagcagttaggaaacactctgtttgtaaagtctgcaaatggatattcagacctctttgaggccttcgttggaaacgggtttttttcatataaggctagacagaagaattcccagtaacttccttgtgttgtgtgtgttcaactcacagagttgaactttcatttacacagagcagatttgaaacactctttttgtggaatttgcaagtggagatttcaagcgctttgaggccaaaggcagaaaaggagatatcttcgtataaaaactagacagaatcattctcagaaactgctgcgtgatgtgtgcgatcaactctcagagattaacttttcttttcattcagcggtttggaaacactctgtttgtaaagtctgcacgtggaaattttgaccacttagagaccttcgttggaaacgggattttttcatgtaaggctagacagaagaattcccagtaactttccttgtgttgtgtgcattcaactcacagagttgaacgttcccttagacagagcagatttgaaacactctatttgtgcaatttgcaagtgtagatttcaagcgctttaaggtcaatggcagaaaaggaaatgtcttcgtttcaaaactagacagaatcattcccaaaaactgcgttgtgatgtgttcgttcaactcacagcagtttaacctttcttttcatagagcagttaggaaacagtctgtttgtaaattctgtaagtggatattctgacatcttgtggccttcgttggaaacgggatttcttcatattctgctagacagaataattctcagtaacttccttgtgttgtgtgtattcaactcacagagttgaacgatcctttacacagagcagacttgaaacactgtttttgtggaatttgcaagtggagatttcagccgctttgagctcaatggtagaataggaaatatcttcctatagaaactagacagaatgattctcagaaactcctttgtgatgtgtgcgttcaactcacagagtttaacctttcttttcatagagcagttaggaaacactctgtttgtaaagtctgcaagtggatattcagacctctttgaggccttcgttggaaacgggatttcttcatattctgccagacagaagaattcccagtaacttccttgtgttgtgtgtgttcaactcacagagttgaactttcatttacacagagcagatttgaaacactctttttgtggaatttgcaagtggagatttcaagcgctttgaggccaaaggcagaaaaggaaatatcttcgtataaaaactacacagaatcattctcagaaactgctgcgtgatgtgtgcgttcaacactcagagtttaacttttcttttcattcagcggtttggaaacactctgtttgtaaagtcggaacgtgcatattttgaccacttagaggccttcgttggaaacgggtttttttcatgtaaggctagacagaagaattcccagtaacttccttgtgttgtgtacattcaactcacagagttgaacgttcccttagacagagcagatttgaaacactctttttgtgcaattggcaagtggagatttcaagcgctttaaggtcaatggcagaaaaggaaataacttcgtttcaaaactagacagaatcattcccacaaactgcgttgtgatctgttaggtaaactcacagagtttaaccattcttttcatagagcagttaggaaacagtctgtttgtaaattctgtaagtggatattctgacatcttgtggccttcgttggaaacgggatttcttcatattctgctagacagaagaactctcagaatcttccttgtgttgtgtgtattcaactcacagagttgaacgatggtttacacagagcagatttgaaacactctttttgtggaatttgcaagtggagatttcagccgctttgaggtcaatggtagaaaaggaaatatcttcgtataaaaactagacagaatgattctcagaaactcctttgtgatgtgtgtgttcaactcacagagtttaacctttctattcatagagtagttaggaaacactctgtttgtaatgtctgcaagtggatattttgacctctttgaggccttcgttggaaacgggtttttttcatgtaaggctagacagaagaattctcagtaacttccttgtgttgtgtgtattcaactgacagagttgaactttcatttagagagagcagatttgaaacactgtttttgtggaatttgcaagtggagatttcaagcgctttggggccaaaggcagaaaacgaaatatcttcgtataaaaactagacagaatcattctcagaaactgctgcgtgatgtgtgcgttcaactctcagagtttaacttttcttttcattcagcggtttggaaacactctcgtttgtaaagcctgcacgtggatattttgaccacttagaggccttcgttggaaacgggtttttttcatgtaaggctagacagaagaattcccagtaacttccttgtgttgtgtgcattcaactcacagagttgaacgttcccttagacagagcagatttgaaacactctatttgtgcaatttgtaagtgtagttttcaagctctttaaggtcaacggcagaaaaggaaatatcttcgtttcaaaactagatcagaatcattcccacaaactgcgttgtgatgtgttcgttcaactaacagagtttaacctttcttttcatagagcagttaggaaacactctgttggtaaattctgtaagtggatattctgacatcttgtggccttcgttggaaacgggatttctacatattctgctagacagaggaattctcagtaacttccttgtgttgtgtgtattcaactcacggagttgaacgatcctttacacagagcagacttgaaacactctttttgtggaatttgcaagtggagatttcagccgctttgaggtcaatagtagaaaaggaaatatcttcgtagaaaaactagacagaatgattctcagaaactcctttgtgatgtgtgtgttcaactcacagagtttaacctttcttttcatagagcagttagtaaacactctgtttataaagtctgcaagtggatattcagacccatttgaggccttcgttggaaacgggatttcttcatattctgctagacagaagaattcccagtaacttccttgtgttgtgtgtgttcaactcacagagttgaactttcatttacacagagcagatttgaaacactctttttgtggaatatgcaagtggagatttcaagcgctttgagaccaaaggcagaaaaggaactatcttcgtttgaaaactagacagaatcattctcagaaactgctctgcgatgtgtgcgttcaactctcagagtttaacttttcttttcattcagcagtttggaaacactctgtttgtaaagtctgcacgtggatattttgaccacttagaggccttcgttggaaacgggtttttttcctataaggctagacagaagaattcccagtaacttccttgtgttgtgtacattcaactcacagagttgaacgttcccttagacagagcagatttgaaacactctttttgtgcaattggcaagtggagatttcaagcgctttaaggttaatggcagaaaaggaaatatcttcgtttcaaaactagacagaatcattcccacaaactgcgttgtgatgtgttcgttcaacacacagagtttaacctttcttttcatagagcagttaggaaacagtctgtttgtaaattctgtaagtggatattctgacatcttgtggccttcgttggaaacgggatttcttcatattctgctagacagaagaattctcagtaacttccttgtgttgtgtgtattcaactcacagagttgaacgatcctttacacagagcagatttgaaacactctttttctggaatttgcaagtggagatttcagccgctttgtggtcaatggtagaaaaggaaatatcttcatataaaaactagacagaatgattctcagaaactcctttgagatgtgtgtgttcaactcacagagtttaacctttcttttcatagagcagttaggaatcactctgtttgtaaagtctgcaagtggatattcagacctctttgaggccttcgttggaaaagggtttttttcatataaggctagagagaagaattcccagtaacttccttgtgttgtgtgtgttcaactcacagagttgaacttccatttacacagagcagatttgaaacactctttttgtggaatttgcaagtggagatttcaagcgctttgaggccaaaggcagaaaaggaaatatcttcgtttcaaaactagacagaatcattctcagaaactgctctgcgatgtgtgcgttcaactctcagagtttaacttttcttttcattcagcagtttggaaacactctgtttgtaaagtctgcacgtggatattttgaccacttagaggccttcgttggaaacgggtttttttcctgtaagactagacagaagaattcccagtaacttctttgtgttgtgtacattcaactcacagagttgaacgttcccttagacagagcagatttgaaacactctttttgtgcaattggcaagtggagatttcaagcgctttaaggtcaatggcagaaaaggaaatatcttcgtttcaaaactagacagaatgattctcagaaactcctttgtgatgtgtgcgttcaactcacagagtttaacctttgttttcatagagcagttaggaaacactctgtttgtaaagtctgaaagtggatattcagacctctttgaggccttcgttggaaacgggtttttttcatataaggctagagagaagaattcccagtaacttccttgtgttgtgtgtattcaactcacagagttgaacgatcctttacacagagcagacttgtaacactctttttgtggaatttgcaagtggagatttctgccgctttgaagtcaaaggtagaaaaggaaatatcttcctataaaaactagacagaatgattctcagaaactcctttgtgatgtgtgcgttcaactcacagagtttaccctttcttttcatagagcagttaggaaacactctgtttgtaaagtttgcaagtggatattcagacatccttgaggctttcgttggaaacgggatttcttcatattctgccagaaagaagaattcccagtaacttccttgtgttgtgtgtgttcaactcacagagttgaacattcatttacacagagcagatttgaaacactctttttgtggaatttgcaagtggagatttcaagcgctttgaggccaaaggcagaaaaggaaatatcttcgtttcaaaactagacagaatcattctcagaaactgctctgcgatgtgtgcgttcaactctcagagtttaacttttcttttcattcagcagtttggaaacactctgtttgtaaagtctgcacgtggatattttgaccacttagaggccttcgttggaaacggttttttttcctgtaaggctaaaaagaagaattctcagtaacttccttgtgttgtgtgtattcaactcacacagttgaacgatcctttacacagagcagacttgtaacactctttttgtggaatttgcaagtggggatttcagccgctttgaagtcaaaggtagaaaaggaaatatcttcctataaaaactagacagaatgattctcagaaactcctttgtgatgtgtgctttcaactcacagagtttaacctttcttttcatagagcagttaggaaacactctgtttgtaaagtctgcaagtggatattcagacctctttgaggccttcgttggaaacgggtttttttcatataaggctagacagaagaattctcagtaacttccttgtgttgtgtgtattcaactcacagtgttgaacgatcctttacacagagcagacttgaaacactctttttgtggaatttgcaagtggagatttcagccgctttgaggtcaatagtagaaaaggaaatatcttcgtagaaaaactagacagaatgattctcagaaactcctttgttatgtgtgcgttcaactcacagagtttaacctttcttttcatagagcagttaggaaacactctgtttgtaaagtctgcaagtggatattcagacatccttgaggctttcgttggaaacgggatttcttcatattctgctagaaagaagaattcccagtaacttccttgtgttgtgtgtgttcaactcacagagttgaactttcatttacacagagcagatttgaaacactctttttgtggaatttgcaaatggagatttcaagcgctttgaggccaaatgcagaaaagaaaatatcttcgtataaaaactagacagaatcattctcagaaactgctctgcgatgtgtgcgttcaactctcagagtttaacttttcctttcattcagcagtttggaaacactctgtttgtaaaatctgcacgtgcataatttgaccacttagaggccttcgttggaaacgggttttttccatgtaaggctagacagaagaattcccagtaacttccttgtgttgtgttcattcaactcacagagttgaacgttcccttagacagagtagatttgaaacactctttttgtgcaattggcaagtggagatttcaagcgatttaaggtcaatggcagaaaaggaaatatcttcgtttcaaaactagacagaatcattcccacaaactgcgttgtgatgtgttcgttcaactcacagagtttaacctttctgttcatagagcagttaggaaacactctgtttgtaaagtctctaagtggatattctgacatcttgtggccttcgttggaaacgggatttcttcatattctgctagacagaagaattctcagtaacttccttgtgttgtgtgtattcaactcacagagttgaacgatcctttacacagagcagacttgaaacactctttttgtggaatttgcaagtggagatttcagccgctttgaggtcaatggtagaaaaggaaatctcttcgtataaagactagacagaatgattctcagaaactcctttgtgatgtgtgcgttcaactcacagagtttaacctttcttttcatagagcagttaggaaacactctgtttgtaaagtctgcaagtggatattcagacttctttgaggctttcgttggaaacgggatttcttcatattctgctatacagaagaattcccagtaacttccttgtgttgtgtgtgttcaactcacagagttgaactttcatttacacagagcagatttgaaacactctttttgtggaatttgcaaatggagatttcaagcgctttgaggccaaaggcagaaaaggaaatatcttcgtataaaaactcgacagaatcattctcagaaactgctctgcgatgtgtgcgttcaactctcagagtttaacttttcttttcattcagcagtttggaaacactctgtttgtaaagtctgcacatggaaaacttgaccacttagaggccttcgttggaaacgggttttttttatgtaaggctagacagaagaattctcagtaacttccttgtgttgtgtgtattcaactcaaagagttgaacgatcctttacacagagcagacttgtaacactctttttgtggaatttgcaagtggagatttcagccgctttgaagtcaaaggtagaaaatgaaatatcttcctataaaaactagacagaatcattcccacaaactgcgttgtgatgtgttcgttcaactcacagagtttaacctttctgttcatagagcagttaggaaacactctgtttgtaaagtctgtaagtggatattctgacatcttgtggccttcgttggaaacgggatttcttcgtattctgctagacagaagaattctcagtaacttccttgtgttgtgtgtattcaactcacaggatttgaacgatcctttacacagagcggacttgaaacactctttttgtggaatttgcaagtggagatttcagccgcgttgaggtcaatggtagaaaaggaaatatcttcgtataaaaactagacagagtgattctcagaaactcctttgtgatgtctgcgttcaactgacagagtttaacctttcttttcatagagcagttaggaaacactctgtttgtaaagtctgcaagtggatattcagacctccttgaggccttcgttggaaacgggatttcttcatattctgctatacagaagaattcccagtaacttccttgtgttgtgtgtgttcaactcacagagatgaactctcatttacacagagcagatttgaaacactctttttgtggaatttgcaagtggagatttcaagcgctttgaggccaaaggcagaaaaggaaatatcttcgtataaaaactagacaaaatcattctcagaaactgctctgcgatgtgtgtgttcaactctcagagtttaacttttcttttcattcagcagtttggaaacactctgtttgtaaagtctgcacgtggataatttgaccacttagaggccttcgttggaaacgggtttttttcatgtaaggctagacagaagaattcccagtaaattccttgtgttgtgtacattcaactcacagagttgaacgttcccttagacagagcagatttgatacactctttttgtgcaattggcaagtggagatttcaagcgctttaaggtcaatggcagaaaaggaaatatcttcgtttcaaaactagacagaatgattctcagaaactcctttgtgatgtgtgcgttcaacacacagagtttaacttttcttttcatagagcagttaggaaacactctgtttgtaaagtctgcaagtggatattcagacctctttgaggccttctttggaaacgggatttcttcatattatgctagacagaataattctcagtaacttccttgtgttgtgtgtattcaagtcacagagttgaacgatcctttacagagagcagacttgaaacactctttttgtggaatttgcaagtggagatttcagccgctttgaggtcaatagtagaaaaggaaatatcttcgtagaaaaactagaaagaatgattctcagaaactcctttgtgatgtgtgtgttcaactcacagagtttaacctttcttttcatagagcagtttggaaacactctgtttgtaaagtctgcaagtggatattcagacctcgttgaggccttcgttggaaacgggatttcttcatattctgctagacagaagaattcccagtaacttccttgtgttgtgtgtgttcaactcacagagttgaactttgatttacacagagcagatttgaaacactctttttgtggaatttgcaagtggaaatttcaagcgctttgaggccaaaggcagaaaaggaaatatcttcgtataaaaactagacagaatcattctcagaaactgctgtgtgatgtgtgcgttcaactctcagagtttaacttttcttttcattcagcggtttggaaacactctgtttgtaaagtctgcacgtggatattttgaccacttagaggccttcgttggaaacgggtttttttcatgtaaggctagacagaagaattcccagtaacttccttgtgttgtgtgcattcaactcacagagatgaacgttcccttagacagaacagatttgaaacactctatttgtgcaatttgcaagtgtagatttcaagcgctttaaggtcaatggcagaaaaggaaatatcttcgtttcaaaactagacagaatcattcccacaaactgcgttgtgatgtgttcgttcaactcacagagtttaacctttctgttcatagagcagttaggaaacactctgtttctaaagtctgtaagtggatattctgacatattgtggccttcgttggaaacgggatttcttcatattctgctagacagaaaaattctcagtaacttctttgtgttgtgtgtattcaactcacagagttgaacgatcctttacacagagcagacttgaaacactctttttgtggaatttgcaagtggagatttcagccgctttgaggtcaacggtagaataggaaatatcttcctatagaaactagacagaattattctcagaaactcctttgtgatgtgtgcgttcaactcacagagtttaacctttcttttcatagagcagttaggaaacactctgtttgtaaggtctgcaagtggatattcagagctccttgaggccttctttggaaacgggatttcttcatattatgctggacagaagaattctcagtaatttccttgtgttgtgtgtattcaactcacagagttgaacgatcctttacacagagcagacttgaaacactctttttgtggaatttgcaaggagatttcagccgctttgaggtcaatggtagaataggaaatatgtacctatagaaactagacagaatgattctcagaaactcctttgtgatgtgtgcgttcaactcacagaggttaacctttcttttcatagagcagttaggaaacactctgtttgtaaagtctgcaagtggatattcagacctccttgaggccttcgttggaaacgggatttcttcatattatgctagacagaagaattcccagtaacttccttgtgttgtgtacattcagctcacagagttgaacgttcccttagacagagcagatttgaaacactctttttgtgcaattggcaaatggagatttcaagcgctttaaggtcaatggcagaaaaggaaatatcttcgtttcaaaactagacagaagcattcccacaaactgcgttgtgatgtgttcgttcaactcacagagtttaacctttcttttcatagagcagttaggaaacagtctgtttgtcaattctgtaagtggatattctgacatcttgtggccttcgttggaaacgggatttcttcatattctgctagacagaagaattctcagtaacttccttgtgttgtgtgtattcaactcacagagttgaacgatcctttacacagagcagacttgaaacactctttttgtggaatttgcaagtggagatatcagccgctttgaggtcaatggtagaataggaaatatcttcctatagaaaatagacagaatgattctcagaaactcctttgtgatgtgtgtgttcaactcacagcagtttaacctttcttttcatagagcagttagtaaacactctgtttataaagtctgcaagtggatattcagacccctttgaggccttcgttggaaacgggatttcttcatattatgctagacagaagaattcccagtgacttccttgtgttgtgtgtgttcaactcacagagttgaactttcatttacccagagcagatgtgaaacactctttttgtggaatttgcaagtggagatttcaagcgctttgaggccaaaggcagaaaaggaaatatcttcgtttcaaaactagacagaatcattctcagaaactgctgcgtgatgtgtgcgttcaactctcagagtttaacttttcttttcattcagcggtttggaaacactctgtttgtaaagtctgcacgtggatattttgaccacttagaggccttcgttggaaacggaattttttcatgtgaggctagacagaagaattcccaagtaacttccttgtgttgtgtacattcaactcacagagttgaacgttcccttagacagagcagatttgaaacactctttttgtgcaattggcaaatggagatttcaagcgctttaaggtcaatggcagaaaaggaaatatcttcgtttcaaaactagacagaatcattcccacaaactgcgttgtgatgtgttcgttcaactcacagagtttaacctttctgttcatagagcagttaggaaacactctgtttgtaaagtctgtaagtggctattctgacatcttgtggcctttgttggaaacgggatttcttcatattctgctagacagaagaattctcagtaacttccttgtgttgtgtgtattcaactcacagagttgaacgatcctttacacagagcagacttgaaacacactttttgtggaatttgcaagtggagatttcagccgctttgaggtcaatggtagaaaaggaaatatcttcgtataaagactagacagaatgattctcagaaacgcctttgtgatgtgtgctttcaactcacagagtttaacttttcttttcatagagcagttaggaaacactctgtttataaagtctgcaagtggatattcagacctctttgaggtcttcgttggaaacgggatttctccatactatgctagacagaagaattcccagtaacttccttgtgttgtgtgtgttcaactcacagagttgaactttcatttacacagagcagatttgaaacactctttttgtggaatttgcaagtggagatgtcaagcgctttgaggccaaaggcagaaaaggaaatatcttcgtttcaaaactagacagaatcattctcagaaactgctctgcgatgtgtgcgttcaactctcagagtttaacttttcttttcattcagcagtttggaaacactgtgtttgtaaagtctgcacgtggataatttgaccacttagaggtcttcgttggaaacgggtttttttcatgtaaggctagacagaagaattctcagtaacttccttgtgttgtgtgtattcaactcacagagttgaacgatcctttacacagagcagacttgtaacactctttttgtggaatttgcaagtggagatttcatccgctttgaagtcaaaggtagaaaaggaaatctcttcgtataaaaactagacagaatgattctcagaaacttctttgtgatgtgtgcgttcaacacatagagtttaacctttcttttcatagagcagttaggaaacactctgtttgtaaagtctgcaagtggatattcagacctctttggggccttcgttggaaaagagatttcttcatactgtgctagacagaagaattctcagtaacttccttgtgttgtgtgtattcaactcacagagttgaacgatcctttacacagagcagacttgtcacactctttttgtggaatttgcaagtggagatttcagccgctttgaagtcaaaggtagaaaaggaaatatcttcctataaaaactagacagaatgattctcagaaactcctttgtgatgtgtgcgttcaactcacagagtttaacctttcttttcatacagcagttaggaaacactctgtttctaaagtctgcaagtggatattcagacctccttgaggccttcgttggaaacgggatttcttcatattatgctagacagaagaattctcagtaacttccttgtgttgtgtgtattcaactgacagagttgaactatcatttacagagagcagatttgaaacactgtttttgtggaatttgcaagtggagatttcaagcgctttggggccaaaggaagaaaaggaaatatcttcgtataaaaactagacagaatcattctcagaaactgctctgcgatgtgtgcgttcaactctcagagtttaacttttcttttcattcagcagtttggaaacactctgtttgtaaagtctgcacgtggatattttgaccacttagaggccttcgttggaaacgggtttttttcttgtaaggctagacagaagaattcctagtaacttccttgtgttgtgtacattcaactcacagagttgaacgttcccttagacagagcagatttgaaacactctttttgtgcaattggcaagtggagatttcagccgctttgaggtccatggtagaaaaggaaatatcttcgtataaaaactagacagaatcattcccacaaactgcgttgtgatgtgttcgttcaactcacagagtttaacctttctgttcatagagcagttaggaaacactctgtttgtaaagtctgtaagtggatattctgacatcttgttgccttgttggaaaagggatttcttcatattctggtagacagaagaattctcagtaacttcccttgtgttgtgtgtattcaactcacagagttgaacgatcctttacacagagcagacttgaaacactctttttgtggaatttgcaagtggagatttcagccgctttgaggtcaatggtagaataggaaatatcttcctatagaaactagacagaatgattctcagaaactcctttgtgatgtgtgcgttcaactcaaagagtttaacctttcttttcatagagcagttaggaaacactctgtttgtaaagtctgcaagtggatattcagacatccttgaggctttcgttggaaacgggatttcttcatattctgctagaaagaagaattcccagtaacttcgttgtgttgtgtgtgttcaactcacagagttgaacttccatttacacagagcagatttgaaacactctttttgtggaatttgcaagtggagatttcaagcactttgaggccaaaggcagaaaaggaaatatcttcgtttcaaaactagacagaatcattctcagaaactgctgcgtgatgtgtgcgttcaactctcagagtttaacttttcttttcattcagcggtttggaaacactctgtttgtaaagtctgcacgtggatattttgaccacttagaggccttcgttggaaacgggttttttttatgtaaggctagacagaagaattcccagtaacttccttgtgttgtgtgcattcaactcacagagttgaacgttcccttagacagagcagatttgaaacactctatttgtgtaatttgcaagtgtagatttcaagcgctttcaggtcaacggcagaaaaggaaatatcttcgtttcaaaactagacagaatcattcccacaaactgcgttgtgatgtgttcgttcaactcacagagtttaaccttcctgttcatagagcagttaggaaacactctgtttgtaaagtctgcaagtggatattcagacctccttgaggccttcgttggaaacgggatttcttcatattctgctagacagaagaattctcagtaactgccgtctgttgtgtgtattcaactcacagagttgaacgatcctttacacagagcagacttgaaacactctttttgtggaatttgcaagtggagatttcagccgctttgaggtcaatggtagaataggaaatatcttcctatagaaactagacagaatgattctcagtaaactcctttgtgatgtgtgtgttcaactcacagagtttaacctttcttttcatagagcagttaggaaacactctgtttgtaaagactgcaggtggatattcaggcctctttgaggccttcgttggaaacgggtttttttcatataaggctagacagaagaattcccagtaacttccttgtgtgtgttcaactcacagagttgaactttcatttacacagagcagatttgaaacactctttttgtggaatttgcaaatggagatttcaagcgctttgaggccaaaggcagaaaaggaaatatcttcgtataaaaacgagacagaatcattctcagaaactcctttgtgatgtgtgcgttcaactctcagagtttaacttttcttttcattcagcggtttggaaacactctgtttgtaaagtctgcacgtggaaattttgaccacttagaggccttcgttggaaacgggtttttttcatgtaaggctagacagaagaattcccagtaacttccttgtgttgtgtgcattcaactcacagagttgaacgttcccttagacagagcagatttgaaacactctatttgtgcaatttgcaagtgtagttttcaagctctttaaggtcaacggcagaaaaggaaatatcttcgtttcaaaactagacagaatgattctcagaaactcctttgtgctgtgtgcgttcagctcacagagtttaacctttcttttcatagagcagttaggaaacactctgtttgtaaagtctgcaagtggatattcagacatctttgaggccttcgttggaaacgggatttcttcatattctgctagacagaagaattctcagaaacttccttgtgttgtgtgttttcaactcacagagttgaacgatgctttacacagagtagacttgaaacactctttttgtgtaatttgcaagtggagatttcagccgctttgaggtcaatgctagaaaaggaaatatcttcgtataaaaactagacagaatgattctcagaaactcctttgtgatgtgtgcgttcaactcacagagtttaacctttcttttcatagagcagttaggaaacactctgtaaagtctgcaagtggatattcagacctccttgaggccttcgttggaaacgggatttcttcatattttgctagacagaagaattcccagtaacttccttgtgttgtgtgcgttcaactcacagagttgaactttcatttacacagagcagatttgaaacactctttttgtggaatttgcaagtggagatttcaagcgctttgaggccaaaggcagaaaaggaaatatcttggtataaaaactagacagaatgattctcagaaactcctttgtgatgtgtgcgttcaactcatcagagtttaacttttcttttcattcagcagtttggaaacactctgtttgtaaagtctgcacgtggatattttgaccacttagaggccttcgttggaaacgggtttttttcatgtaaggctagacagaagaattcccagtaacttccttgtgttgtgtacattcaactcacagagttgaacgttcccttagacagagcagatttgaaacactctttttgtgcaattggcaaatggagatttcaagcgctttaaggtcaatggcagaaaaggaaatatcttcgtttcaaaactagacagaatcattcccacaaactgcgttgtgatgtgttcgttcaactcacagagtttaacctttcttttcatacagcagttaggaaacagtctgtttgtcaattctgtaagtggatattctgacatcttgtggccttcgttggaaacgggatttcttcatattctgctagacagaagaattctcagtaacttccttgtgttgtgtgtattcaactcacagagttgaatgatcctttacacagagcagacttgaaacactctttttgtggaatttgcaagtggagatttcagccgctttgaagtcaatggtagaaaagaaaatatcttcgtataaagactagacagaatgattctgagaaatcctttgtgatgtgtgcgttcaactcacagagtttaacctttcttttcatagagcagttaggaaacactctgtttgtaaagtctgcaagtggatattcagacctccttgaggccttcgttggaaacgggatttcttcatattatgctagacagaagaattctcagtaacttccttgtgttgtgtgtattcaactgacagagttgaactttcatttagagagagcaggtttgaaacactgtttttgtggaatttgcaagtggagatttcaagcgctttggggccaaaggcagaaaacgaaatatcttcgtttaaaaactagacagaatcattctcagaaactgctctgcgatgtgtgcgttcaactctcagagtttaacttttcttttcattcagcagtttggaaacactctgtttgtaaagtctgcaggtggatattttgaccacttagaggccttcgttggaaacgggtttttttcctgtaaggctagacagaagaattcccagtaacttccttgtgttgtgtgcattcaactcacagagttgaacgttcccttagacagagcagatttgaaacactctatttgtgcaatttgcaagtgtagatttcaagcgctttaaggtcaatggcagaaaaggaaatatcttcgttttaaaactagacagaatcattcccacaaactgcgttgtgacgtgttcgttcaactcacagagtttaacctttctgttcatagagcagttaggaaacactctgtttgtaaagtctgcaagtggatattcagacctccttgaggccttcgttggaaacgggatttcttcatattctgctagacagaataattctcagtaacttccttgtgttttgtgttttcaactcaccgagttgaaggatcctttacagagagcaggcttgaaacactctttttctcgaatttgcaagtggagattacagccgctttgaggtcaatggtagaaaaggaaatatcttcgtataaagactagacagaatgattctcagaaactcctttgtgatgtgtgcgttcaactcacagagtttaacctttcttttcatagagcagttaggaaacactctgtttgtgaagtctgcaagtggatattcagacatccttgaggctttcgttggaaacgggatttcttcatattctgctagaaagaagaattctcagtaacttccttgtgttgtgtgtattcaactgacagagttgaactttcatttagagtgagcagatttgaaacactgtttttgtggaatttgcaagtggagatttcaagcgctttggggccaaaggcagaaaaggaaatatcttcgtataaaaactagacagaatcattctcagaaactgctgcgtgatgtgtgcgttccactctcagagtttaacttttcttttcattcagcggtttggaaacactctgtttgtaaagtctgcacgtggatattttgaccacttagaggccttcgttggaaacgggttttttttcatgtaaggctagacagaagaattcccagtaacttccttgtgttgtgtgcattcaactcacagagatgaacattcccttagacagagcagatttgaaacactctatttgtgtaatttgcaagtgtagatttcaatcgctttaaggtcaatggcaaaaaaggaaatatctgcgtttcaaaactagacagactcattcccaaaaactgcgttgtgatgtgttcgttaaactcacagagtttaacctttctgttcatagagcagttaggaaacactctgtttgtgaagtctgtaagtggatattcagacctccttgaggccttcgttggaaacgggatttcttcatattctgctagacagaagaattctcagaatcttccttgtgttgtgtgtattcaactcacagagttgaacgatcctttacacagagcagacttgaaacactctttttgtggaatttgcaagtggagatttcaagcgctttgaggccaaaggcagaaaaggaaatatcttcgtttcaaaactagacagaatgattctcagaaactcctttgtgatgtgtgcgttcaactcacagagtttaacctttcttttcatagagcagttaggaaacactctgtttgtaaagtctgcaagtggatattcagacatccttgaggctttcgttggaaacgggatttcttcatattctgccagaaagaagaattcccagtaacttccttgtgttgtgtgtgttcaactcacagagttgaactttcatttacacagagcacatttgaaacactctttttgtggaatttgcaagtggagatttcaagcgctttgaggccaaaggcagaaaaggaaatatcttcgtataaaaactagacagaatcattctcagaaactgctctgcgatgtgtgcgttcaactctcagagtttaacttttcttttcattcagcagtttggaaacactctgtttgtaaagtctgcacgtggatattttgaccacttagaggccttcgttggaaaggggtttttttcctataaggctagccagaagaattcccagtaacttccttgtgttgtgtgcattcaactcacagagttgaacgttcccttagacagagcagatttgaaacactctatttgtgcaatttgcaagtgtagttttcaagctctttaaggtcaacggcagaaaaggaaatatcttggtttcaaaactagacagaatcatttccacaaactgcgttgtgatgtgttcgttcaactcacagagtttaacctttctgttcatagagcagttaggaaacactctgtttgtaaagtctgtaagtggatattctgacatcttgtggccttcgttggaaacgggatttcttcatattctgctagacagaagaattctcagtaacttccttgtgttgtgtgtattcaactcacagagttgaacgatcctttacacagagcggacttgaaacactcgttttgtggaatttgcaagtgcagatttcagccgcgttgaggtcaatggtagaaaaggaaatatcttcgtataaaaactagacagaatgattctcataaactcctttgtgatgtgtgcgttcaactcacagagtttaacctttcttttcatagagcagttaggaaacactctgtttgtaaagtctgcaagtggatattcagacctccttgagtccttcgttggaaacgggatttcttcatattctgctagacagaagaattctcagtaacttccttctgttgtgtgtattcaactgacagagttgaactttcatttagagagagcagatttgaaacactgtttttgtggaatttgcaagtggagatttcaagcgctttggggccaaaggcagaaaaggaaataacttcgtataaaaacttgacagaatcattctcagaaactgctgcgtgatgtgtgcgttcaactctcagagtttaacttttcttttcattcagcggtttggaaacactctgtttgtaaagtctgcacgtggatattttgaccacttagaggccttcgttggaaacgggtttttttcatgtagggctagacagaagaattcccagtaacttccttgtgttgtgtacattcaactcacagagttgaacgttcccttagagcagatttgaaacactctttttgtgcaattggcaagtggagatttcaagcgctttaaggtcaatggcagaaaaggaaatatcttcgtttcaaaactagacagaatcattcccacaaactgcgttgtgaggtgttcgttcaactcacagagtttaacctttcttttcatagagcagttaggaaacagtctgtttgtaaattctgtaagagtatattctgaaatattgtggccttcgttggaaacgggatttcttcatattctgctagacagaagaattctcagtaacttccttgtgttgtgtgtattcaactcacagagttgaacgatcctttccagagagcagacttgaaacactttttgtggaatttgcaagtggagatttctgtcgctttgaggtcaaaggtagaataggaaatatcttcctatagaaactagacagagtgattctcagaaactcctttgtgatgtctgcgttcaactcacagagtttaacctttcttttcatagagcagttaggaaacactctgtttgtaaagtctgcaagtggatattcagacctccttgaggccttcgttgtaaacgggatttctaaatattatgctagacagaagaattctcagtaaattccttgtgttgtgtgtattcaactgacagagttgaactttcatttggagagagcagatttgaaacactgtttttgtggaatttgcaagtggagatttcaagcgctttggggccaaaggcagaaaaggaaatatcttcgtataaaaactagacagaatcattctcagaaaatgctctgtgatgtgtgcgttcaactctcagagtttaacttttgttttcattcagcagtttggaaacactctgtttgtaaagtctgcacgtggatattttgaccacttagaggccttcgttggaaacgggtttttttcatgaaagggtagacagaagaattcccagtaacttccttgtgttgtgtgcattcaactcacagagttgaacgttcccttagacagaggagatttgaaacactctatttgtgcaatttgcaattgtagatttcaagcgctttaaggtcaatggcagaaaaggaaatatcttcgtttcaaaactagacagaatcattcccacaaactgcattgtgatgtgttcgttcaactcacagagtttaacctttcttttcatagagcagttaggaaacagtctgtttgtcaattctgtaagtggatattctgacatcttgtggccttcgttggaaacgggatttcttcatattccgctagacagaagaattctcagtaacttccttgtgttgtgtgtattcaactcacagagttgaacgatcctttacacagagcagacttgtaacactctttttgtggaatttgcaagtggagaattcagccgctttgaagtcaaaggtagaaaaggaaataacttcctataaaaactagacagaagaattcccagtaacttccttgtgttgtgtgtgttcaactcacagagttgaactttcatttacacagagtagatttgaaacactctttttgtggaatttgcaagtggagatttcaagcgctttgaggccaaaggcagaaaaggaaatatcttcgtataaaaactagacagaatcattctcagaaactgctgcgtgatgtgtgcgttaaactctcagagtttaacttttcttttcattcagcggtttggaaacactctgtttgtaaagtctgcacgtggatattttgaccacttagaggccttcgttggaaacgggtttttttcatgtaaggctagacagaagaattcccagtaacttccttgtgttgtgtgcattccactcacagagttgaacgttcccttagacagagcagatttgaaacactctatttgtgcaatttgcaagtgtagatttcaagcgctttaaggtcaatggcagaaaaggaaatatcttcgtttcaaaactagacagaatcattcccacaaactgcgttgtgatgtgttcgttcaactcacagagtttaacctttcttttcatagagcagttaggaaacagtctgtttgtaaattctctaagtggatattctgacatcttgtggccttcgttggaaacgggatttcttcatattctggtagacagaagaattctcagtaacttccttgtgttgtgtgtattcaactcacagagttgaatgatcctttacacagaacagacttgaaacactctttttgtggaatttgcaagtggagatttcagccgctttgaggtcaatggtagaataggaaatatcttcctatagaaactagacagaatgattctcagaaactcctttgtgatgtgtgcgttcaactcacagagtttaacctttctgttcatagagccgttaggaaacacactgtttgtaaagtctgcaagtggatattcagacctctttgaggccttcgttggaaacgggatttcttcatattatgctagacagaagaattctcagtaacttccttgtgttgtgtgtattcaactgacagagttgaactttcatttagagagagaagatttgaaacactgtttttgtggaatttgcaattggagatttcaagcgctttggggccaaatgcagaaaaggatatatcttcgtataaaaactagacagaatgattctcagaaacttctttgtgatgtgtgcgttcaactcacagagtttaaactttcttttcatagagtagttaggaatcactctgtttgtaaagtctgcaagtagatattttgacctctttgaggccttcgttggaaacgggtttttttccagtaaggctagacagaagaattcccagtaacttccttgtgttgtgtacattcaactcacagagttgaacgttcccttagacagagctgatttgaaacactctttttgtgcaattggcaagtggagatttctagcgctttaaggtcaatggcagaaaaggaaatatcttcgtttcaaaactagacagataatcattcccacaaactgcgttgtgatgtgttcgttcatctcacagagtttaacctttcttttcgtagagcagttaggaaacagtctgtttgtaaattctgtaagtggatattctgacatcttgtggccttcgttggaaacgggatttcttcatattctgctagacagaagaattctcagaatcttccttgtgttgtgtgtattcaactcacacagttgaacgatggtttacacagagcagatttgaaacactctttttgtggaatttgcaagtggagatttcagccgctttgaggtcaatggtagaaaaggaaatatcttcgtataaaaactagacagaatgattctcagaaactcctttgtgatgtgtgtgttcaactcacagagtttaacctttcttttcatagagcagttagtaaacactgtttataaagtctgcaagtggatattcagacccctttgaggccttcgttggaaacgggatttcttcatattatgctagacagaagaattcccagtaactttccttgtgttgtgtgtgttcaactcacagagttgaactttcatttacacagagcagatttgaaacactctttttgtggaatttgcaagtggagatttcaagcgctttgaggccaaaggcagaaaaggaaatagtcttcgtttcaaaactagacagaatcattctcagaaactgctctgcgatgtgtgcgttcaactctcaaagtttaacttttcttttcattcagcagtttggaaacactctgtttgtaaagtctgcacgtggataacttgaccacttagaggccttcgttggaaacaggtttttttcctgtaaggctagacagaataattcccagtaacttccttgtgttgtgtacattcaactcacagagttgaacgttcccttagagagagcagatttgaaacactcgttttgtgaaattggcaagtggagatttcaagggctttaaggtcaatggcagaaaaggaaatatcttcgtttcaaaactagacagaatcattcccacaaactgcgttgtgatgtgttcgttcaactcacagagtttaacctttcttttcatagagcagttaggaaacactctgtttgtaaattctgtaagtggatattctgacatcttgtggccttcgttggaaacgggatttcttcatattctgctagacagaagaattctcagtaactgccttgtgttgtgtgtattcaactcacagagttgaacgatcctttacacagagcagacttgaaacactctttttgtggaatttgcaagtggagatttcagccgctttgacgtcaatggtagaataggaaatatcttcctatagaaactagacagaatgattctcagaaactcctttgtggtgtgtgtgttcaactcacagagtttaacctttcttttcatagagcagttagtaaacactctgtttataaagtctgcaagtggatattcagacccctttgaggccttcgttggaaacgggatttcttcatattatgctagacagaagaattctcagtaacttccttgtgttgtgtgtattcaactgacagatttgaactttcatttagagagagtagatttgaaacactgtttttgtggaatttgcaagtggagatttcaagcgctttggggccaaaggcagaaaaggaaatatcttcgtataaaaactagacagaatcattctcagaaactgctgcgtgatgtgtgcgttcacctctcagagtttaacttttcttttcattcagcggtttggaaacactctgtctgtaaagtctgcacgtggatattttgaccacttagaggccttcgttggaaacgggtttttttcatgtaaggctagacagaagaattctcagtaacttccttgtgttgtgtgtattcaactcacacagttgaacgatcctttacacagagcagacttgtaacactccttttgtggaatttgcaagtggagatttcagccgctttgaagtcaaatgtagaaaaggaaatatcttcctataaaaactagacagaatgattctcagaaacccctttgtgatgtgtgcgttcaactcacagagtttaacctttctgttcatagagcagttaggaaacactctgtttgtaaagtctgtaagtggatattctgacatcttgtggccttcgttggaaaagggatttcttcctattctgctagacagaagaattctcagaatcttccttgtgttgtgtgtattcaactcacagagttgaacgatcctttacacagagcagacttgaaacactctttttgtggaatttgcaagtggagatttcagccgctttgaggtccatggtagaaaaggaaatatcttcgtacaaaaactagacagaaatgattctcagaaactcctttgtgatgtgtgtgttcaactcacagagtttcacctttcttttcatagagcagataggaaacactctgtttgtaaagtctgcaagtggatattcagacctctttgaggccttcgttggaaacgggtttttttcatataaggctagacagaagaattcccggtaacttccttgtgttttgtgtgttcaactcacagagttgaactttcatttacacagagcagatttgaaacactctttttgtggaatttgcaagtggagatttcaagcgctttgaggccaaaggcagaaaaggaaatatcttcgtttcaaaactagacagaatcattctcagaaactgctctgcgatgtgtgcgttcaactctcagagtttaacttttctattcattcagcagtttggaaacactctgtttgtaaagtctgcacgtggatattttgaccacttagaggccttcgttggaaacgggtttctttcctgtaaggctagacagaagaattcccagtaacttccttgtgttgtgtacattcaactcacagagttgaacgttcccttagacagagcagatttgaaacactctttttgtgcaattggcaagtggtgatttcagccgctttgaggtcaatggtagaaaaggaaatatcttcgtataaaaactagacagaatgattctcagaaactcctttgtgatgtgtgcgttcaactcacagagtttaacctttcttttcatagagcagttaggaaacactctgtttgtaaagtctgcaaatggatattcagacctccttgaggccttcgttggaaacgggatttcttcatattatgctagacagaagaattctcagtaacttccttgtgttgtctgtattcaactcacagagttcaacgattctttacacagagcagacttgaaacagtctttttgtggaatttgcaagtggagatttcagccgctttgaggtcaattgtagaaaaggaaatatcttcgtataaaaactggacagaatgattctcataaactcctttgtgatgtgtgcgttcaactcacagagtttaacctttcttttcatagagcagttagtaaacactctgtttataaagtctgcaagtggatattcagacccctttgaggccttcgttggaaacgggatttcttcatattatgctagacagaagaattctcagtaacttccttgtgttgtgtgtattcaactgacagagttgaactttcatttagaaagagcagatttgaaacactgtttttgtggaatttgcaagtggagatttcaagcgctttggggccaaaggcagaaaaggaaatatcttcgtataaaaactagacagaatcattctcagaaactgctgcgtgatgtgtgcgttcaactctcaagagtttaacttttcttttcattcagcggtttggaaacactctgtttgtaaagtctgcacgtggatattttgaccacttagaggccttcgttggaaacgggtttttttcatgtaaggctagacagaagaattcccagtaacttccttgtgttgtgtacattcaactcacagagttgaacgttcccttagacagagcagatttgaaacactctttttgtgcaattggcaaatggagatttcaagcgctttaaggtcaatggcagaaaaggaaatatcttcgtttcaaaactagacagaatgattctcagaaactcctttgtgatgtgtgggttcaactcacagagtttaacctttcttttcatagagcagttaggaaacactctgtttgtaaagtctgcaagtggatattcagacatccttgaggctttcgttggaaacgggatttcttcatattctgctagaaagaagaattctcagtaacttccttgtgttgtgtgtattcaactcacagagttgaacgatcctttacacagagcagacttgaaacactctttttgtggaatttgcaagtggatatttcagccgctttgagttcaatggtagaataggaaatatcttcctatagaaactagacagaatgattctcagaaactcctttgtgatgtgtgtgttcaactcacagagtttaacctttcttttcatagagcagttagtaaacactctgtttataaagtctgcaagtggatattcagacccatttgaggccttcgttggaaacgggatttcttcatattatgctagacagaagaattcccagtaacttcccttgtgttgtgtgtgttcaactcacagagttgaactttcatttacacagagcagatttgaaacactctttttgtgcaatttgcaagtggagatttcaagcgctttgaggccaaaggcagaaaaggaaatatcttcgtttcaaaactagacagaatcattctcagaaactgctgcgtgatgtgtgcgttcaactctcagagtttaacttttcttttcattcagcggtttggaaacactctgtttgtaaagtctgcacgtggatattttgacgacttagaggccttcgttggaaacgggtttttttcatgtaaggctagacagaagaattcccagtaacttccttgtgttgggtgcattcaactcacagagttgaacgttcccttagacagagcagatttgaaacactctatttgtgcaatttgcaagtgtagatttcaagcgctttaaggtcaatggaagaaaaggaaatatcttcgtttcaaaactagacagaatcattcccacaaactgcgttgtgatgtgttcgttcaactcacagagtttaacctttctgttcatagagcagttaggaaacactctgtttttaaagtctgtaagtggatattctgacatcttgtggccatcgttggaaacgggatttcttcatattctgctagacagaagaattctcagtaacttccttgtgttgtgtgtattcaactcacagagttgaacgatcctttacacagagcagacttgaaacactcgttttgtggaatttgcaagtggagatttcagctgctttgaggtcaatggtagaaaaggaaatatcttcgtataaaaactagacagaatgattctcagaaactcctttgtgatgtaagcgttcaactcacagagtttaacctttctttacatagagcagttaggaaacactctgtttgtaaagtctgcaagtggatattcagacctccttgaggccttcgttggaaacgggatttcttcatattatgctagacagaagaattccgagtaacttccttgtgttgtgtgtgttcaactcacagagttgaactttcatttacacagagcagatttgaaacactctttttgtggaatttgcaagtggagatttcaagcgctttgaggccaaaggcagaaaaggaaatatcttcgtataaaaactagacagaatcactctcagaaactgctctgcgatgtgtgcgttcaactctcagagtttaacttttcttttcattcagcagtttggaaacactctgtttgtaaagtctgcacgtggataacttgaccacttagaggccttcgttggaaacgggtttttttcctgtaaggctagacagaagaattcccagtaacttccttgtgttgtgtacattcaactcacagagttgaacgttcccttagacagagcagatttgaaacactctttttgtgcaattggcaaatggagatttcaagcgctttaaggtcaatggcagaaaaggaaatatcttcgtttcaaaactagacagaatcattcccacaaactgcgttgtgatgtgtacgttcaactcacagagtttaacctttctgttcatagagcagttaggaaacacgctgtttgtaaagtctgtaagtggatattctgacatcttgtggccttcgttggaaacgggatttcttcatattctgctagacagaagaattctcagtaccttccttgtgttgtgtgtattcaactcacagagttgaacgatcctttacacagagcagacttgtaacactctttttgtggaatttgcaagtggagatttcagccgctttgaagtcaaaggtagaaaaggaaatatcttcctataaaaactagacagaatgattctgagaaactcgtttgtgatgtgtgcgttcaactcacagagtttaacctttcttttcatagagcagttaggaaacactctgtttgtaaagtctgcaagtggatattcagacctccttgaggccttcgttggaaacgggatttcttcatattatgctagacaaaagaattctcagtaacttccttgtgttgtgtgtattcaactgaaagagttgaactttcatttagagagagcagatttgaaacactgtttttatggaatttgcaagtggagatttcaagcgctttggggccaaaggcagaaaaggaaatatcttcgtataaaaactagacagaatcattctcagaaactgctgcgtgatgtgtgcgttcaactctcagagtttaacttttcttttcattcagcggtttggaaacactctgtttgtaaagactgcaggtggatattttgaccacttagaggccttcgttggaaacgggttttttttcatgtaaggctagacagaagaattcccagtaacttccttgtgttgtgtgcattcaactcacagagttgaacgttcccttagacagagcagatttgaaacactctatttgtgcaatttgcaagtgtagatttcaagcgctttaaggtcaatggcagaaaaggaaatatcttcgtttcaaaactagacagaatcattcccacaaactgcgttgtgatgtgttcgttcaactcacagagtttaacctttccgttcatagagcagttaggaaacactctctaaagtctgtaagtggatattcagacctccttgaggtcttcgttggaaacgggatttcttcatattctgctagacagaagaattctcagtaacttccttgtgttgtgtgtattcaactcacagagttgaacgatcctttacacagagcagacttgaaacactctttttgtggaatttgcaagtggagatttcagccgctttgaggtcaatggtagaaaagaaaatatcttcgtataaagactagacagaatgattctcagaaactcctttgtgatgtgtgcgttgaactcacacagtttaacctttcttttcatagagcagttaggaaacactctgtttgtaaagtctgcaagtggatattcagacctccttgaggccttcgttggaaacgggatttcttcatattatgctagacagaagaaatcccagtaacttccttgtgttgtgtgtgttcaactcacagagttgaactttcatttacacagagcagatttgaaacactctttttgtggaatttgcaagtggagatttcaagcgctgtgaggccaaaggcagaaaaggaaatatcttcgtataaaaactagacagaatcattctcagaaactgctctgcgatgtgtgcgttcaactctcagagtttaacttttcttttcattcagcagtttggaaacactctgtttgtaaagtctgcacgtggatatttcgaccacttagaggccttcgttggaaacgggtttctttcctgtaaggctagacagaagaattcccagtaacttccttgtgttgtgtacattcaactcacagagttgaacgttcccttagacagagcagatttgaaacactctttttgtgcaattggcaagtggagatttcaagcgctttgaggtcaatggcagaaaaggaaatatcttcgtttcaaactagacagaatcattcccacaaactgcgttgtgatgtgttcgttcaactcacagagtttaacctttcttttcatagatcagttaggaaacagtctgtttgtcaattctgtaagtggatattctgacatcttgtggccttcgttggaaacgggatttcttcatattctgctagacagaataattctcagtaacttccttgtgttgtgtgcattcaactcacagagttgaacgatcctttacagagagcagagttgaaacactttttgtggaatttgcaagtggagatttcagccgctttgaggtcaaaagtagaataggaaatatcttcctatagaaactagacagaatgattctcagaaactcctttgtgatgtgtgtgttcaactcacagagtttaacctttcttttcatagagcagttagtaaacactctgtttatatagtctgtaagtggatattctgacattttgtggccttggttggaaatgggatttcttcatattctccaagacagaagaattcccagtaacttccttgtgttgtgtgtgttcaactctgtgagttgaactttcatttacacagagcagatttgaaacactctttttgtggaatttgcaagtggagatttcaagcgctttgaggccaaaggcagaaaaggaaatatcttcgtataaaaactagacagaatcattctcagaaactgctgcgtgatgtgtgcgttcaactctcagagtttaacttttcttttcattcagcggtttggaaacactctgtttgtaaagtctgcacgtggatattttgaccacttagaggccttagttggaaacgggttttttgcatgtaaggctagacagaagaattcccagtaacttcattgtgttgtgtgaattcaactcacagagttgaacgttcccttagacagagcagatttgaaacactctatttgtgcaatttgcaagtgtagatttcaagcgctttaaggtcaatggcagaaaaggaaatatcttcgtttcaaaactagacagaatcattcccacaaactgcgttgtgatgtgttcgttcaactcacagagtttaacctttctgttcatagagcagttaggaaacactctgtttgtaaagtctgcaagtgggtattcagacctccttgaggccttcgttggaaacgggatttcttcatattctgctagacagaagaactctcagtaacttccttgtgttgtgtgtattcaactcacagagttgaacgatcctttacacagagcagacttgaaacactctatttgtggaatttgcaagtggagatttcagccgctttgagttcaatggtagaataggaaatatcttcctatagaaactagacagaatgattctcagaaactcctttgtgatatgtgcgttcaactcacagagttaaacctttcttttcatagagcagttgggaaacactctgtttgtaaagtctgcaagtggatattcagacttctttgaggccttcgttggaagcgggatttcttcatattctgctagacagaagaattctcagtaacttccttgtgttgtgtgtattcaactcacagagttgaacgatcctttacacagagcggacttgaaacacactttttgaggaatttgcaagtggagatttcagccgcgttgaggtcaatggtagaaaaggaaatatcttcgtataaaaactagacagaatcattctcagaaactgctgcgtgatgtgtgcgttcaactctcagagtttaacttttcttgtcattcagcggtttggaaacactctgtttgtaaagtctgcacgtggatattttgaccacttagtggccttcgttggaaacgggttttttttcatgtaaggctagacagaagatttcccagtaaattccttgtgttgtgtacattcaactcacagagttgaacgttcccttagacagagcagatttgaaacactctttttgtgcaattggcaagtggagatttcaagcgctttaaggtcaatggcagaaaaggaaatatcttcgtttcaaaactagacagaatcattcccacaaactgcgttgtgatgtgtttgttcaactcacagagtttaacctttctgttcatagagcagttaggaaacactctgtttgtaaagtctgcaagtggatattcagacctccttgaggccttcgttggaaacgggatttcttcatattctgctagacagaagaattctcagaatcttcccttgtgttgtgtgtattcaactcacagagttgaacgatcctttacacagagcagacttgaaacactctttttgtggaatttgcaagtggagatttcagccgctttgaggtccatggtagaaaaggaaatatcttcgtataaaaactagacagaatgattctcagaaactcctttgtgatgtgtgcgttcaactcacagagtttaacctttcttttcatagagcagttaggaaacactctgtttgtaaagtctgcaagtggatattcagacctctttgaggccttcgttggaaacgggttttttacatataaggcttgacagaagaattcccagtaacttccttgtgttgtgtgtgttcaactgacagagttgaactttcatttacacagagcagatttgaaacactctttttgtggaatttgcaagtggagatttcaagcgctttgaggccaaaggcagaaaaggaaatatcttcgcataaaaactagacagaatcattctcagaaaatcctctgtgatgtgtgcgttcaactctcagagtttaacatttcttttcattcagcagtttgaaaacactctgtttgtaaagtctgcacgtggatattttgaccacttagaggccttcgttggaaacgggtttttttcatgtaagtgtagacagaagaattcccagtaacttccttgtgttgtgtgcattcaactcacagagttgaacgttcccttagacagagcagatttgaaacagtctatttgtgtaatttgcaagtgtagatttcaagcgctttcaggtcaacggcagaaaaggaaatatcttcgtttcaaaactagacagaatcattcccacaaactgcgttgtgatgggttcgttcaactcacagagtttaacctttcttttcatagagcagttaggaaacagtctgtttgtcaattctgtaagtggatattctgacatcttgtggccttcgttggaaacgggatttcttcatattctgctagacagaagaattctcagtgacttccttgtgttgtgtgtattctactcacagagttgaacgatcctttacacagagcagacttgaaacactctttttgtggaatttgaaagtggagatttcagccgctttgaggtcaatggtagaaaaggaaatatcttcgtataaagactagacagaatgattctcataaactcctttgtgatgtgtgcgttcaactcacagagtttaacttttcttttcatagagcagttaggaaacactctgtttgtaaagtctgcaagtggatattcagacctctttgaggccttcgttggaaacgggatttcttcatattatgctagacagaagaattcccagtaacttccttgagttgtgtgtgttcaactcacagagttgaacattcatttacccagagcagatttgaaacactctttttgtggaatttgcaagtggagatttcaagcgctttgaggccaaaggcagaaaaggaaatatcttcgtttcaaaactagacagaatcattctcagaatctgctctgcgatgtgtgcgttcaactctcagagtttaacttttcttttcattcagcagtttggaaacactctgtttgtaaagtctgcacgtggatattttgaccacttagaggccttcgttggaaacgggtttttttcctgtaaggctagacagaagaattcccagtaacttccttgtgttgtgtacggttcaactcacagagttgaacgttcccttagacagagcagatttgaaacactctttttgtgcaattggcaagtggagatttcaagcgctttaaggtcaatggcagaaaaggaaatatcttcgtttcaaaactagacagaatcattcccacaaactgtgttgtgatgtgttcgttcaactcacagagtttaacctttctgttcatagagcagttaggaaacactctgtttgtaaagtctgtaagtggatattctgacatcttgtggccttcgttggaaacgggatttcttcatattctgctagacagaagaattctcagtaacttccttgtgttgtgtgtattcaactcacagagttgaacgatcctttacacagagcagacttgaaacactctttttgtggaatttgcaagtggagatttcagccgctttgaggtcaatagtagaaaaggaaactatcttcatataaagactagacagaatgattctcagaaactcctttgtgatgtgtgcgttcaactcacagagtttaacttttcttttcatagagcagttaggaaacactctgtttgtaacgtctgcaagtggatattcagacctctttgaggccttcgttggaaacgggatttcttcatattatgctagacagaagaattctcagtaacttccttgtgttgtgtgtattcaactcacagagttgaacgatcctttacacgagagcagagcttgaaacactctttttgtggaatttgcaagtggagatttcatgccgctttgaggtcagtggtagaaaaggaaatatcttcgtataaagactagacagaatcattctcagaaactgctctgcgatgtgtgcgttcaactctcagagtttaactttgcttttcattcagcagtttggaaacactctgtttgtaaagtctgcacgtggatattttgaccacttagaggccttcgttggaaacgggtttctttcctgtaaggctagacagaagaattcccagtaacttccttgtgttgtgtacattcaactcacagagttgaacgttcccttagacagagcagatttgaaacactctttttgtgcaattggcaagtggtgattttagccgctttgaggtcaatggtataaaaggaaatatcttcgtattaaaactagacagaatcattcccacaaactgcgttgtgaggtgttcggtaaactcacagagtttaacctttcttttcatagagcagttaggaaacagtctgtttgtaaattctgtaagtggatattctgacatcttgtggccttcgttggaaacgggatttcttcatattctgctatacagaataattctcagtaacttccttgtgttgtgtgtattcaactcacagagttgaacgatcctttacagagagcagacttgaaacactctttttgtggaatttgcaagtggagatttcagccgctttgaggtcaaaggtagaataggaaatatgcttcctacagaaaatagacagaatgattctcataaactcctttgtgatgtgtgcgttcaacacacagagtttaacctttctgttcatagagcagttaggaaacactctgtttgtaaagtctgtaagtgcatattctgacatcttgaggccttcgttggaaacgggatttcttcatattctgctagacagaagaattcccagtaacttccttgtgttgtgtgtgttcaactcacagagttgaactttcatttacacagagcagatttgaaacactctttttgtggaatttgcaagtggagatttcaagcgctttgaggccacaggcagaaaaggaaatatcttcgtttcaaaactagacagaatcattctcagaaactgctgcgtgatgtgtgcgttcaactctcagagtttaacttttctagtcattcagcggtttggaaacactctgtttgtaaagtctgcacgtggatattttgaccacttagaggccttcgttggaaacgggattttttcatgtaaggctagacagaagaattctcagtaacttccttgtgttgtgtgtattcaactcacagagttgaacgaatcctttacagagagcagacttgaaacactctttttgtggaatttgcaagtggagatttcagccgctttgaggtcaatggtagaataggaaatatcttcctatagaaaatagacagaatgattctcagaaactcctttgtgatgtgtgcgttcacctcacagagattaacctttcttttcatagagcagttaggaaacactctgtttgtaaagtctgcaagtggatattcagacctctttgaggccttcgttggaaacgggatttcttcatattctgctacacagaagaattctcagtaacttccttgtgttgtgtgtattcaactcacagagttgaacgatcctttacacagagcagtcttgaaacactctttttgtggaatttgcaagtggagatttcagccgctttgaggtcaatagtagaaaaggaaatatcttcgtagaaaaactagacagaatgattctcagaaactcctttgtgatgtgtgcgttcaactcacagagtttaacctttcttttcatagagcagttaggaaacactctgtttgtaaagtctctaagtggatattcagacctctttgaggccttcgttggaaacgggtttttttcatataaggctagacagaagaattcccagtaacttccatgtgttgtgtgtgttcaactcacagagttgaactttcatttacacagagcagatttgaaacactctttttgtggaatttgcaaatggagatttcaagcgctttgaggccaaaggcagaaaaggaaatatcttcgtataaaaactagacagaatcattctcagaaactgctatgcgatgtgtgcgttcaactctctgagtttaacttttcttttcattcagcagtttggaaacactctgtttgtaaagtctgcacgtggataatttgaccacttagaggtcttcgttggaaacgggtttttttcatgtaagggtagacagaagaattcccagtaacttccttgtgttttgtgcattcaactcacagagttgaacgttcccttagacagagcagatttgaaacactctatttgtgcaatttgcaagtgtagatttcaagcgctttaaggtcaatggcagaaaaggaaatatcttcgtttcaaaactagacagaatcattcccacaaactgtgttgtgatgtgttcgttcatctcacagagtttaacctttcttttcatagagcagttaggaaacactatgtttgtaaattctgtaagtggatattctgacatcttgtggccttcgttggaaacgggatttcttcatattctgctagacagaagaattctcagtaacttccttgtgttgtgtgtattcaactcacagagttgaacgatcctttacagagagcagacttgaaacactctttttgtggaatttgcaagtggagatttcaggggttttgaggtcaatggtagaaaaggaaatatcttcgtataaagactagacagaatgattctcagaaactcctttgtgatgtgtgcgttcaactcaaagagtttaacttttcttttcatagagcagttaggaaacactctgtttgtaaagtctgcaagtggatattcagacctctttgaagccttcgttggaaacgggatttcttcatattatgctagacagaagaattcccagtaacttccttgtgttgtgtgtgttcaactcacagagttgaactttcatttacacagagcagatttgaaacactctttttgtggaatttgcaaatggagatttcaagcgctttgaggccaaaggcagaaaaggaaatatctttgtataaaaactagacagaatcattctcagaaactgctctgcgatgtgtgcgttcaactctcaaagtttaactttgcttttcattcagcagtttggaaacactctgtttgtaaagtctgcacgtggataatttgaccacttagaggccttcgttggaaacgggtttttttcatgtaaggctagacagaagaattcccagtaacttccttgcgttgtgtacattcaactcacagagttgaacgttcccttagacagagcagatttgaaacactctttttgtgcaattggcaagtggagatttcaagcgctttaaggtcaatggcagaaaaggaaatatcttcgtttcaaaactagacagaatgattctcataaactcctttgtgatgtgtgcgttcaactcacagagtttaacctttcttgtcatagagcagttaggaaacactctgtttgaaaagtctgcaagtggatattcagacctccttgaggccttcgttggaaacgggatttcttcatattctgctagacagaagaattctcagtaacttccttgtgttgtgtgtattcaactcacagagttgaacgatcctttacacagagcagacttgaaacactctttttggggaatttgcaagtggagatttcagccgctttgaggtcaatggtagaaaaggaaatatcttcgtataaagactagacagaatgattctcagaaactcctttgtgatgtgtgcgttcaactcacagagtttaacttgtcttttcatagagcagttaggaaacactctgtaaagtctgcaagtggatattcagacctctttgaggccttcgttggaaacgggatttcttcatattatgctagacagaagaattctcagtaacttccttgtgttgtgtgtattcaactgacagagttgaaccttcatttagagagagcagatttgaaacactgtttttgtggaatttgcaagtggagatttcaagcgctttggggccaaaggcagaaaaggaaatatcttcgtataaaaactagacagaatcattctcagaaactgctctgcgatgtgtgcgttcaactctcagagtttaacttttcttttcattcagcagtttggaaacactctgtttgtaaagtctgcacgtggatattttgacctcttagaggccttcgttggaaacgggtttttttcctgtaaggctagacaagaagaattgccagtaacttccttgtgttgtgtgcattcaactcacagagttgaacgttcccttagacagagcagatatgaaacactctatttgtgcaatttgcaagtgtagatttcaagcgctttaaggtcaatggcagaaaaggaaatatcttcgtttcaaaactagacagaatcattctcagaaactgctctgcgatgtgtgcgttcaactctcagagtttaacttctcttttcattcagtagtttggaaacactctgtttgtaaagtctgcacgtggataacttgaccacttagaggccttcgttggaaacgagtttttttcatgtaaggctagacagaagaattctcagtaacttccttgtgttgtgtgtattcatctcacagagttgaacgatcctttacacagagcagacttgtaaaactctttttgtggaatttgcaagtggagatttcagccgctttgaagtcaaaggtagaaaaggaaatatcttcctataaaaactagacagaatgattctcagaaactcctttgtgatgtgtgtgttcaactcacagagtttaacctttcttttcatagagcagttaggaaacactctgtttgtaaagtctgcaagtggatattctgacctctttgaggccttcttcggaaacgggtttttttcatataaggctagacagaagaattcccagtaacttccttgtgttgtgtgtgttcaactgacagagttgaactttcatttacacagagcagatttgaaacactctttttgtggaatttgcaggtggagatttcaagcgctttgaggccaaaggcagaaaaggaaatatcttcgtataaaaactagacagaatcattctcagaaactgctgcgtgatgtgtgcgttcaactctcagagtttaacttttcttttcattcagcggtttggaaacactctctttgtaaagtctgcacgtggatattttgaccacttagaggccttcgttggaaacgggtttttttcatgtaaggctagacagaagaattcccagtaacttccttgtgttgtgtacattcaactcacagagttgaacgttcccttagacagagcagatttgaaacactctttttgtgcaattggcaaatggagatttcaagcgctttaaggtcaatggcagaaaaggaaatattcttcgtttcaaaactagacagaatgattctcataaactcctttgtgatgtgtgcgttcaacacacagagtttaacctttctgttcatagagctgttaggaaacactctgtttgtaaagtctgtaagtggatattctgacatcttttggccttcgttggaaacgggatttcttcatattctgctagacagaagaattctcagtaacttccttgtgttgtgtgtattcaactcacagagttgaacgatcctttacacagagcagacttgtaacactctttttgtggaatttgcaagtggagatttcagccgctttgaggtcaaaggtagaaaaggaaatatcttcctataaaaactagacagaatgattctcagaaactcctttgtgatgtgtgcgttcaactcacagagtttaacctttcttttcatagagcagttaggaaacactctgtttgtaaagtctgcaagtggatattcagacctccttgaggccttcgttggaaatgggatttcttcatattctgctagacagaagaattcccagtaacttccttgtgttgtgtgtgttcaactcacagagttgaactttcatttacacagagcagatttgaaacactctttttgtggaatttgcaagtggagatttcaagcgctttgaggccaaaggcagaaaaggaaatatgttcgtttcaaaactagacagaatcattctcagaaactgctctgcgatgtgtgcgttcaactctcagagtttaacttttcttttcattcagcagtttggaaacactgtgtttgtaaagtctgcacgtggatattttgaccacttagaggccttcgttggaaacgggttttttttcctgtaaggctagagagaagaattcccagtaacttccttgtgttgtgtgcattcaactcacagagttgaacgttcccttagacagagcagatttgaaacactctatttgtgcaatttgcaagtgtagatttcaagcgctttaaggtcaatggcagaaaaggaaatatcttcgtttcaaaactagacagaatcattcccacaaactgcgttgtgacgtgttcgttcaactcacagagtttaacctttctgttcatagagcagttaggaaacactctgtttgtaaagtctgtaagtggatattctgacatcttgtggccttcgttggaaacaggatttcttcgaattctgctagacagaagaattctcagtaacttccttgtgttgtgtgtattcaactcacagagttgaacgatcctttacacagagcagatttgtaacactctttttgtggaatttgcaagtggagatttcagccgctttgaagtcaaaggtagaaaaggaaataacttcctataaaaactagacagaatgattctcagaaactcctttgtgatgtgtacgttcaactcacagagtttaacctttcttttcatagagcagttaggaaacactctgtttgtaaagtctgcaagtggatattgagacctctttgaggccttcgttggaaacgggtttttttcatgtaaggctagacagaagaattctcagtaacttccttgtgttgtgtgtattcaactgacagagttgaactttcatttagagagagcagatttgaaaccctgttttgtggaatttgcaagtggagatttcaagcgctttggggccaaaggcagaaaaggaaatatcttcgtataaaaactagacagaatgattctcagaaactgctctgcgatgtgtgcgttcacctctcagagtttaacttttcttttcattcagcagtttggaaaccctctgtttgtaaagtctgcacgtgcataatttgaccacttagaggccttcgttggcaacgggtttttttcatgtaaggctagacagaagaattcccagtaacttcccttgtgttgtgtacatttaactcacagagttgaacgttcccttagacagagcagatttgaaacactctttttgtgcaattggcaagtggagatttcaagcgctttaaggtcaatggcagaaaaggaaatatcttattttcaaaactagacagaacgattctcagaaactcctttgtgatgtgtgcgttcaactcacagagtttaacctttcttttcatagagcagttaggaaactgtctgtttgtaaagtctgcaagtggatattcagacctctttgaggccttcgttggaaacgggatttcttcatattctgctagacagaagaattctcagtaacttccttgtgttgtgtgtattgaactcgcagagttgaacgatcctttacagagagcagacttgaaacactctttttgtggaatttgcaagtggagatttcagccgctttgaggtcaatggtagaaaaggaaatatcttcgtataaagactagacagaatgattctcagaaactcctttgtgatgtgtgcgttcaacacacagagtttaacttttcttttcatagagaagttagtaaacactctgtttataaagtctgcaagtggatattcagacccctttgaggccttcgttggaaacgggatttcttcatattatgctagacagaagaattccaagtaacttccttgtgttgtgtgtgtccaactcacagagttgaactttcatttacacagagcagatttgaaacactctttttgtggaatttgcaaatggagatttcaagcgctttgaggccaaaggcagaaaaggaaatatcttcgtataaaaaccagacagaatcattctcagaaactgctcgtgcgatgtgtgcgttcgactctcagagtttaacttttcttttcattcagcagtttggaaacactctgtttgtaaagtctgcacgtggataatttgaccacttagaggccttcgttggaaacgggtttttttcatgtaaggctagacagaagaattcccagtaacttccttgtgttgtgtacattcaactcacagagttgaaccgttcccttagacagagcagatttgaaacactctttttgtgcaattggcaagtggagatttcaagcgctttaaggtcaatggcagaaaaggaaatatcttcgtttcaaaactaggcagaatgattctcagaaactcctttgtgatgtgtgcgttcaactcacagagtttaacctttcttttcatagagcagttaggaaacgctctgtttgtaaagtctgcaagtggatattcagacatccttgaggctttcgttggaaacgggatttcttcatattctgctagaaagaagaattctcagtaacttccttgtgttgtgtgcattcaactcacagagttgaacgatcctttacacagagcagacttgaaacactctttttgtggaatttgcaagtggagatttcagccgctttgaggtcaatggtagaaaaggatactatcttcgtataaagactagacagaatgattctcagaaactcctttgtgatgtgtgcgttcaactcacagagtttaacctttcttttcatagagcagttaggaaacactctgtttgtaaagtctgcaagtggatattcagacatctttgaggctttcgttggaaacgggatttcttcatattctgctagacagaagaattctcagtaacttccttctgttgtgtgtattcaactcacagagttgaacgatcctttacacagagcagacttgaaacactctttttgtggaatttgcaagtggagatttcagccgctttgaggtcaatggtagaataggaaatatcttcctatagaaactagacagaatcattctcagaaactgctctgcgatgtgtgcgttcaactctcagagtttaacttttcttttcattcagcagtttggaaacactctgtttgtaaattctgcacgtggataacttgaccacttagaggccttcgttggaaacgggtttttttcctgtaaggctagacagaagaattcccagtaacttccttgtgttgtgtacattcaactcacagagttgaacgttcccttagacagagcagatttgaaacactctttttgtgcaattggcaaatggagatttcaagcgctttaaggtcaatggcagaaaaggaaatatcttcgtttcaaaactagacagaatcattcccacaaactgcgttgtgatgtgttcgttcaactcacagagtttaacctttctgttcatagagcagttaggaaacactgtgtttgtaaagtctgtaagtggatattctgacatcttgtggccttcgttggaaacgggatttcttcattttctgctagacagaagaattctcagtaacttccttgtgttgtgtttattcaactcacagagttgaacgatcctatacacagagcagacttgaaacactctttttgtggaatttgcaagtggagatttcagccgctttgaggtcaatggtagaataggaaatatcttcctatagaaactagacagagtgattctcagaaactcctttgggatgtctgcgttcaactcacagagtttaacctttcttttcatagagcagttaggaaacactctgtttgtaaagtctgcaagtggatattcagacctccttgaggccttcgttggaaacgggatttcttcatattctgctatacagaagaattctcagaaacttccttgtgttgtgtgtattcaactcacagagttgaacgatcgtttacacagagcagacttgagacactctttttgtggaatttgtaagtggagatttcagccgctttgaggtcaatggtagaaaaggaaatatcttcatataaagactagacagaatcattctcagaaactgctctgcgatgtgtgcgttcaactctcagagtttaacttttcttttcattcagcagtttggaaacactctggttgtaaagtctgcacgtggataacttgaccacttagaggccttcgttggaaacgggtttttttcctgtaaggctagacagaagaattcccagtaacttccttgtgttgtgtacattcaactcacagagttgaacgttcccttagacagagcagatttgaaacactctttttgtgcaattggcaagtggagatttcaagcgctttgaggtcaatggcagaaaaggaaatatcttcgtttcaaaactagacagaatgattctcagaaactcctttgtgatgtgtgagttcaactcacagagtttatcctttcttttcatagagcagttaggaaacactctgtttgtaaagtgtgcaagtggatattcagacctctttgaggccttcgttggaaacgggatttcttcatattctgctagacagaagaattctcagtaacttccttgtgttgtgtgcattgaactcacagagttgaacgatcctttacacagggcagacttgaaacactctttttgtggaatttgcaagcggagatttcagcctctttgaggttaatggtagaaattgaaatatcttcgtatagaaactagacaaaatgattctcagaaactcctttgtgatgtgtgcgttcaactcacagagtttaacttttcttttcatagagcagttaggaaacactctgtttgtaaagtctgcaagtggatattcagacctctttgaggccttcgttggaaacgggattcttcatattatgctagacagaagtattctcagtaacttccttgtgttgtgtgtattcaactgacagagttgaactttcatttagagagagcagatttgaaacactgtttttgtggaatttgcaagtggagatttcaagcgctttggggccaaaggcagaaaaagaaatatcttcgtataaaaactagacagaatcattctcagaaactgctctgcgatgtgtgcgttcaactctcagagtttaacttttcttttcattcagcagtttggaaacactctgtttgtaaagtctgcacgtggatattttgagcacttagaggccttcgttggaaacgggtttttttcctgtaaggctagacagaagaattcccagtaacttccttgtgttgtgtacattcaactcacagagttgaacgttcccttagacagagcagatttgaaacactctttttgtgcaattggcaaatggagatttcaagcgctttaaggtcaatggcagaaaaggaaatatcttcgtttcaaaactagacagaatcattcccacaaactgcgttgtgatgtgttcgttcaactcacagagtttaacctttcttttcatagagcagttaggaaacagtctgtttgtcaattctgtaagtggatattctgacatcttgtggccttcgttggaaacgggatattcttcatattctgctagacagaagaattctcagtaacttccttgtgttgtgtgtattcaactcacagagttgaacgatcctttacacagagcagacttgaaacactctttttgtggaatttgcaagtggagatttcaggcgctttgaggtcaatagtagaaaaggaaatatcttcgtagaaaaactagacagaatgattctcagaaactcctttgtgatgtgtgtgttcaactcacagagtttaacctttcttttcatagagcagttagtaaacactctgtttataacgtctgcaagtggatattcagacccctttgaggccttcgttggaaacgggatttcttcatattatgctagacagaagaattctcagtaacttccttgtgttgtgtgtattcaactgacagagttgaactttcttttagagagagcagatttgaaacactgtttttgtggaatttgcaagtggagatttcaagcgctttggggccaaaggcagaaaaggaaatatcttcgtataaaaactagacagaatcattctcagaaactgctctgcgatgtgtgcgttcaactctcagagtttaacttttcttttcattcagcagtttggaaacactctgtaaactctgcatgtggatattttgaccacttagaggccttcgttggaaacgggtttttttcctgtaaggctagacagaagaattcccagtaacttccttgtgttgtgtacattcaactcacagagttgaacgttcccttagacagagcagatttgaaacactctttttgtgcaattggcaagtggtgatttcagccgctttgaggtcaatggtagaaaaggaaatatcttcgtataaaaactagacagaatgattctcagaaacttcattgtgatgtgtgcgttcaactcacagagtttaacctttcttttcatacagcagttaggaaacactctgtttgtaaactctgcaagtcgatattcacacctctttgaggccttcgttggaaacgggatttcttcatactatgctagacagaagaattctcagtaacttccttgtgttgtgtgtattcaactcacagagttgaacgatcctttacacagagcagacttgtaacactctttttgtggaatttgcaagtggagatttcagccgctttgaagtcaaaggtagaaaaggaaataacttcctataaaaactagaaagaatgattctcagaaactcctttgtgatgtgtgtgttcaactcacagagtttaacctttcttttcatagagcagttagtaaacactctgtttataaagtctccaagtggatattcagacccctttgaggccttcgttggaaacgggatttcttcatattatgctagacagaagaattcccagtaacttctttgtgttgtgtgtgttcaactcacagagttgaactttcatttacacagagcagatttgaaacactctttttgtggaatttgcaagtggagatttcaagcgctttgaggccaaaggcagaaaaggaaatatctttgtataaaaactagacagaatcattctcagaaactgctctgcgatgtgtgtgttcaactctcagagtttaacttttcttttcattcagcagtttggaaacactctgtttgtaaagtctccacgtggataatttgaccacttagaggccttcgttggaaacgggtttttttcatgtaaggctagacagaagaattctcagaatcttccttgtgttgtgtgtattcaactcacacagttgaacgacggtttacacagagcagatttgaaacactctttttgtggaatttgcaagtggagatttcagctgctttgaggtcaatggtagaaaaggaaatatcttcgtataaaaactagacagaatgattctcagaaacttctttgtgatgtgtgcgttcaactcacagagtttaacctttcttttcatagagcagttaggaaacactctgtttgtaaactctgcaagtggatattcagacctttttgaggccttcgttggaaacgggatttcttcatactgtgctagacagaataattctcagtaacttccttgtgttgtgtgtattcaactcacagagttgaaggatcctttacagagagcaggcttgaaacactctttttgtcgaatttgcaagtggagatttcagccgctttcaggtcaatggtagaataggaagtatcttcttatagaaactagacagaatgattctcagaaactcttttgtgatgtgtgcgttcaactcacagagtttaacctttcttttcatagagcagttaggaaacactctgtttgtaaaggctgcacgtggatatttggacttctttgaggccttcattggaaacgggtttttttcatgtaaggctagacagaagaattcccagtaacttccttgtgttgtgtgtgttcaaatcacagagttgaactttcatttacacagagcagatttgaaacactctttttgtggaatttgcaaatggagatttcaagcgctttgaggccaaaggcagaaaaggaaatatcttcgtataaaaactagacagaatcattctcagaaactgctctgcgatgtgtgcgttcaactctcagagtttaacttttcttttcattcagcagtttggaaacactctgttcgtaaagtctgcacgtggataacttgaccacttagaggccttcgttggaaacgggtttttttcctgtaaggctagacagaagaattcccagtaacttccttgtgttgtgtgcattcaactcacagagttgaacgttcccttagacagagcagatttgaaacactctgtgcaatttgcaagtgtagatttcaagcgctttaaggtcaacggcagaaaaggaaatatcttcgtttcaaaactagacagaaatcattcccacaaactgcgttgtgatgtgttcgttcaactcacagaagtttaacctttcttttcatagagcagttaggaaacagtctgtttgtaaattctgtaagtggatattctgacatcttgtggccttcgttggaaacgggatttcttcatattctgctagacagaagaattctcagtaacttccttgtgttgtgtgtattcaactcacggagttgaacgatcgtttacacagagcagacttgaaacactctttttgtggaatttgcaagtggagatttcagccgcgttgaggtcaatggtagaaaaggaaatatcttcgtataaaaactagacagaatgattctcagaaacttcattgtgatgtgtgcgttcaactcacagagtttaacctttcttttcatagagcagttaggaaacactctgtttgtaaactctgcaagtggatattcagacctctttcaggccttcgttggaaacgggatttcttcatactgtgctagacagaagatttcccagtaacttccttgtgttgtgtgtgttcaactcacagagttgaactttcatttacacagagcagatttgaaacactctttttgtggaatttgcaaatggagatttcaagcgctttgaggccaaaggcagaaaaggaaatatcttcgtataaaaactagacagaatcattctcagaaactgctctgcgatgtgtgcgttcaactctcacagtttaacttttcttttcattcagcagtttggaaacactctgtttgtaaagtctgcacgtggataatttgaccacttagaggcctttgttggaaacgggttattttcatgtaaggctagacagaagaattcccagtaacttccttgtgttgtgtgcaatcaaatcacagagttgaacgttcccttagacagagtagatttgaaacactctatttgtgcaatttgcaagtgtagatttcaagcgctttaaggtcaaaggcagaaaaggaaatatcttcgtttcaaaactagacagaacgattctcagaaactcctttgtgatgtgtgcgttgaactcacagagtttaacctttcttttcatagagcagttaggaaacactctgtttgtaaagtctgcaagtggatattcagacctctttgaggccttcgttggaaacgggatttctccatattctgctagacagaagaattctcagtaacttccttgtgttgtgtgtattcaactcacagagttgaacgatcctttaaacagagcagacttgaaacactctttttgtggaatttgcaagtggagatttcagccgctttgaggtcaatggtagaaaaggaaactaccttcatataaagactagacagaatgattctcagaaactcctttgtgatgtgtgcgttcaactcacagagtttaacctttcttttcatagagcagttaggaaacactctgcttgtaaagtctgcaagtggatattcagtcctctttgaggccttcgttggaaacgggtttttttcatataaggctagacagaagaattcccagtaacttcccttgtgttgtgtgtgttcaactcacagagttgaactttcatttacacagagcagatttgaaacactctttttgtggaatttgcaggtggagatttcaagcgctttgaggccaaaggcagaaaaggaaatatcttcgtataaaaactagacagaatcattctcagaaactgctctgcgatgtgtgcgttcaactctcaagagtttaacttttcttttcattcagcagtttggaaacactctgtttgtaaagtctgcacgtggatattttgaccacttagaggccttcgttggaaacgggtttttttcctgtaaggctagacagaagaattcccagtaacttccttgtgttgtgtacattcaactcacagagttgaacgttcccttagacagagcagatttgaaacactctttttgtgcaattggcaagtggtgatttcagccgctttgaggtcaatggtagaaaaggaaatatcttcgtataaaaactagacagaatgattctgagaaactcctttgtgatgtgtgcgttaaactcacagagtttaccctttcttttcatagagcagttaggaaacactctgtttgtaaagtctgcaagtggatattcagacatccttgaggctttcgttggaaacgggatttcttcatattctgccagaaagaagaattctcagtaacttccttgtgttgtgtgtattcaactcacacagttgaacgatcctttacacaaagcagacttgtaacactctttttgtggaatttgcaagtggggatttcagccgctttgaagtcaaatgtagaaaaggaaatatcttcctataaaaactagacagaatgattctcagaaacttctttgtgatgtgtgcgttcaactcacagagtttaacctttcttttcatagagcagttaggaaacactctgtttgtaaactctgcaagtggatattcagacctactttgaggccttcgttggaaacgggatttcttcatactgtgctagacagaagaattctcagtaacttccttgtgttgtgtgtattcaactcacagagttgaacgatcgtttacacagagcggacttgaaacactctttttgtggaatttgcaattggagatttcagccgcgttgaggtcaatggtagaaaaggaaatctcttcgtataaaaactagacagaaccattctcagaaactgctctgcgatgtgtgcgttcaactctcagagtttaacttttcttttcattcagcagtttggaaacactctgtttgtaaagtctgcacgtggatattttgaccacttagaggccttcgttggaaacgggtttttttcctgtaaggctagacagaagaattcccagtaacttccttgtgttgtctacattcaactcacagagttgaacgttcccttagacagagcagatttgaaacactctttttgtgcaattggtaagtggtgatttcagccgctttgaggtcaaaggtagaaaaggaaatatcttcgtataaaaactagacagaatcattcccaaaaactgcgttgtgatgtgctcgttcaactcacagagtttaacctttcttttcatagagcagttaggaaacagtctgtttgtaaattctgtaagtggatattctgacatcttgtggccttcgttggaaacgggatttcttcatattctgctagacagaagaattctcagtaacttccgcgtgttgtgtgtattcaactcacagagttgaacgatcctttacacagagcagacttgacacactctttttgtggaatttgcaagtggagatttcagccgctttgaggtcaatggtagaaaaggaaatatcttcgtataaaaactagacagaatgattctcagaaactcctttgtgatgtgtgcgttcaactcacagagtttaacctttcttttcatagagcagttaggaaacactctgtttgtaaagtctgcaagtggatattcagccctctttgaggccttcgttggaaacggttttttttcatataaggctagacagaagaattctcagtaacttccttgtgttgtgtgtattcaactcacagagttgaactttcatttagagagagcagatttgaaacactgtttttgtggaatttgcaagtggagatttcaagcgctttgcggccaaaggtagaaaacgaaatatcttcgtataaaaactagacagaatcattctcagaaactgctgcgtgatgtgtgcgctcaactctcagagtttaacttttcttttcattcagcggtttggaaacactctgtttgtaaagtctgcacgtggacattttgaccacttagaggccttcgttggaaacgggtttttttcatgtaaggctagacagaagaattctcagtaacttccttgtgttgtgtgtattcaactcacagagttcaacgatgctttacacagagtagacttgaaacacactttttgttgaatttgcaactggagatttcagccgctttgaggtcaatggtagaataggtaatatcttcctatagaaactagacagaatgattctcagaaactcctttgtgatgtgtgcgctcaactcacagagtttagcctttcttttcatggagcagttaggaaacactctgtttgtaaagtctgcaagtggatattcagacctctttgaggccttcgttggaaacgggatttcttcatattctgctagacagaagaattctcagaaacttccttgtgttgtgtgtattcaactcacagagttgaacgatcctttacacagagcagacttgaaacactctttttgtggaatttgcaagtggagatttcagccgctttgaggtcaatgttagaataggaaatatcttcctatagaaactagacagaatgattctcagaatctcctttgtgatgtgtgcgttcaactcacagagtttaacctttcttttcatagagcagttaggaaacactctgtttgtaaagtctgcaagtggatattcagacctctttgaggccttcgttggaaacgggtttttttcatataaggctagacagaagaattcccagtaacttccttgtgttgtgtgtgttcaactcacagagttgaactttgatttacacagagcagatttgaaacactctttttgtggaatttgcaggtggagatttcaagcgctttgaggccaaaggcagaaaaggaaatatcttcgtataaaaactagacagaatcattctcagaaactgctctgcgatgtgtgcgttcaactctcagagtttaacttttcttttcattcagaagtttggaaacactctgtttgtaaagtctgcacgtggataacttgaccacttagaggccttcgttggaaacgggtttttttcatgtacggctagacagaagaattcccagtaacttccttgtgttgtgtgcattcaactcacagagttgaacgttcccttagacagagcagatttgaaacactctatttgtgcaatttgcaagtgtagatttcaaccgctttaaggtcaatggcagaaaaggaaatatcttcgtttcaaaactagacagaatcattctcagaaactgctctgcgatgtgtgcgttcaactctcagagtttaacttttcttttcattcagcagtttggaaacactctgtttgtaaagtctgcacgtggataatttgtccacttagaggccttcgttggaaacgggtttttttcatgtaaggctagacagaagaattctcagtaacttccttgtgttgtgtgtattcaactcacagagttgaacgatcctttacacagagcagacttgtaacactctttttgtggaatttgcaagtggagatttcagctgctttgaagtcaaaggtagaaaaggaaatatcttcctataaaaactagacagaatgattgtcagaaactcctttgtgatgtgtgcgttcaactcacagagtttaacctttcttttcatagagcagttaggaaacactctgtttgtaaagtctgcaagtggatattcagacttctttgaagccttcgttggaagcgggatttcttcatattctgctagaaagaagaattcccagtaacttcccttgtgttgtgtgtgttcaactcacagagttgaactttcatttacacagagcagatttgaaacactctttttgtggaatttgcaagtggagatttcaagcgctttgaggccgaaggcagaaaaggaaatatcttcgtttcaaaactagacagaatcattctcagaaactgctctgcgatgtgtgtgttcaactctcagagtttaacttttcttttcattcagcagtttggaaacactctgtttgtaaagtctgcacgtggatattttgaccacttagaggccttcgttggaaacgggtttttttcctgtaaggctagacagtagaattcccagtaacttccttgtgttgtgtgcattcaactcacagagttgaacgttcccttagacagagcagatttgaaacactctatttgtgcaatttgcaagtgtagttttcaagctctttaaggtcaacggcagaaaaggaaatatcttggtttcaaaactagacagaatcattcccacaaactgcgttgtgatgtgttcgttcaactcacagagtttaacctttcttttcatagagcagttaggaaacagtctgtttgtaaattctgtaagtggatattctgacatccttgtggccttcgttggaaacgggatttcttcatattctgctagacagaagaattctcagtaacttccttgtgttgagtgtattcaactcacagagttgaacgatcctttacacagagcagacttgtaacactctttttgtggaatttgcaagtggagatttcagccgctttgaagtcaaaggtagaaaaggaaatatcttcctataaaaactagacagaatgattctcagaaactcctttgagatgtgtgtgttcaactcacagagtttaacctttcttttcatagagcagttaggaatcactctgtttgtaaagtctgcaggtggatattcagacctctttgaggccttcgttggaaacgggtttttttcatataaggctagagagaagaattcccagtaacttccttgtgttggctgtgttcaactcacagagttgaactttcatttacacagagcagatttgaaacactctttttgtggaatttgcaaatggagatttcaagcgctttgaggccaaaggcagaaaaggaaatatcttcgtataaaaactcgacagaatcattctcagaaactgctctgcgatgtgtgcgttcaactctcagagtttaacttttcttttcattcagcagtttggaaacactctgtttgtaaagtcttcacgtggataatttgaccacttagaggccttcgttggaaacgggtttttttcatgtaaggctagacagaagaattcccagtaacttccttgtgttgtgtacattcaactcacagagttgaacgttcccttagacagagcagatttgaaacactctttttgtgcaattggcaagtggagatttcaagcgctttaaggtcaatggcagaaaaggaaatatcttcgtttcaaaactagacagaatcattctcagaaactgctctgcgatgtgtgtgttcaactctcagagtttaacttttcttttcattcagcagtttggaaacactctgtttgtaaagtctgcacgtggataatttgaccacttagaggccttcattggaaacgggtttttttcatgtaaggctagacagaagaattctcagtaacttccttgtgttgtgtgtattcaactcacagagttgaccgatcctttacacagagcagacttgtaacactctttttgtggaatttgcaagtggagatttcagccgctttgaagtcaatggtagaaaaggaaatatcttcctataaaaactagacagaatgattctcagaaactcctttgtgatgtgtgcgttcaactcacagagtttaaccttccttttcatagagcagttaggaaacactctgcttgtaaagtctgcaagtggatattcagacctctttgaggccttccttggaaacgggattttttcatataaggctagacagaagaattcccagtaacttccttgtgttgtgtgtattcaactcacagagttgaactttcatttacacagagcagatttgaaacactctttttgtggtatttgcaagtggagatttcagccgctttgatgtcaatgatagaaaaggaaatatcttcgtataaaaactagacagaatcattctcagaaactgctgcgtgatgtgtgcgttcaactctcagagtttaacttttcttttcattcagcggtttggaaacactctgtttgtaaagtctgcacgtggatattttgaccacttagaggtcttcgttggaaacgggttttttttaatgtaaggctagacagaagaattcccagtaacttccttgtgttgtgtacattcaactcacagagttgaacgttcccttagacagagcagatttgaaacactctttttgtgcaattggcaaatggagatttcaagcgctttaaggtcaatggcagaaaaggaaatatcttcgtttcaaaactagacagaatcattcccacaaactgcgttgtgatgtgttcgttcaactcacagagtttaacctttctgttcatagagcagttaggaaacactctgtttgtaaagtctgcaagtggatattcagacctccttgaggctttcgttggaaacgggatttcttcatattctgctagacagagaagattctcagaaacttccttgtgttgtgtgttttcaactcacagagttgaacgatcctttacacagagcagacttgaaacactccttttgtggaatttgcaagtggagatttcagccgctttgaggtcaatggtagaataggaaatatcttcctatagaaactagacagatgattctcagaaactcctttgagatgtgtgcgttcaactcacagagtttaacctttcttttcatagagcagttaggaaacactctgtttgtaaagtctgcaagttgatattcagacctccttgaggccttcgttggaaacgggatttcttcatattatgctagacagaagaattcccagtaacttcccttgtgttgtgtgtgttcaactcacagagttgaactttcatttacacagagcagatttgaaacactctttttgtggaatttgcaaatggagatttcaagcgctttgcggccaaaggcagaaaaggaaatatcttcgtataaaaactagacagaatcattctcagaaactgctctgcgatgtgtgcgtttaactctcagagtttaacttttcttttcattcagcagtttggaaacactctgtttgtaaagtctgcacgtggataacttgaccacttagaggccttcgttggaaacgggtttttttcatgtaaggctagacagaagaattcccagtaacttccttgtgttgtgtgcattcaactcacagagttgaacgttcccttagacagagcagatttgaaacactctatttgtgcaatttgcaagtgtagttttcaagctctttaaggtcaacggcagaaaaggaaatatcttggtttcaaaactagacagaatcattctcagaaactgctctgcgatgtgtgctttcaactctcagagtttaacttttcttttcattcagcagtttggaaacactctgtttgtaaagtctgcacgtggataacttgaccacttagaggccttcgttggaaacgggtttttttcatgtaaggctagacagaagaattctcagtaacttccttgtattgtgtgtattcaactcacatagttgaacgatcctttacacagagcatacttgaaacactcttcttgtggaatttgcaagtggagatttcagccgctttgaggtcaatggtagaataggaaatatcttcctatagaaactagacagaatgattctcagaaactcctttgtgatgtgtgcgttcaactcacagagtttaacctttgttttcatagagcagttaggaaacactctgtttgtaaagtctgcaagtggatattcagacctgcttgaggccttctttggaaacgggatttcttcttattatgccagacagaagaattcccagtaacttccttgtgttgtgtgtgttcaactcacagagttgaactttcatttacacagagcagatttgaaacactctttttgtggaatttgcaaatggagatttcaagcgctttgaggccaaaggcagaaaacgaaatatcttcgtataaaaactagacagaatcattctcagaaactgctgcgtgatgtgtgcgttcaactctcagagtttaacttttcttttcattcagcggtttggaaacattctgtttgtaaagtctgcacgtggatattttgaccacttagaggccttcgttggaaacgggtttttttcatgtaaggctagacagaagaattcccaggaacttccttgtgttgtgtacattcaactcacagagttgaacgttcccttagacagagcagatttgaaacactctttttgtgcaattggcaaatggagatttcaagcgctttaagttcaatggcagaaaaggaaatatcttcgtttcaaaactagacagaatcattcccacaagctgcgttgtgatgtgttcgttcaactcacagagtttaacctttctgttcatagagcagttaggaaacactctgtttgtaaagtctgtaagtggatattctgacatcttgtggccttcgttggaaacgggatttcttcatattctgcaagacagaagaattctcagttacttccttgtgttgtgtgtattcaactcacagagttgaacgatcctttacacagagcagacttgaaacactctttttatggaatttgcaagtggagatttcagccgctttgaggtcaatggtagaaaaggaaatatcttcgtataaagactagacagaatgattctcagaaactcctttgtgatgtgtgcgttcaactcacagagtttcacttttcttttcatagagcagttaggaatcactctgtttgtaaagtctgcaagtggatattcagacctctttgaggccttcggtggaaacgggatttcttcatattatgctagacagaagaattctcagtaacttccttgtgttgtgtgtattcaactcacagagttgaaagatcctttacagagagcaggcttgaaacactctttttgtcgaatttgcaagtggagatttcagccgctttgaggtcaatggtagaataggaaatatcttcttatagaaactagacagaatcattctcagaaactgctgcgtgatgtgtgcgttcaactctctgagtttaacttttcttttcattcagcggtttggaaacactctgtttgtaaagtctgcacgtggatattttgaccacttagaggccttcgttggaaacgggtttttttcatgtaaggctagacagaagaattcccagtaacttccttgtgttgtgtgcattcaactcacagagttgaacgttcccttagacagagcagatttgaaacactctatttgtgcaatttgcaagtgtagatttcaagcgctttaaggtcaacggcagaaaaggaaatatgttcgtttcaaaactagacagaatgattctcagaaactcctttgtgatgtgtgcgttcaactcacagagtttcacctttcttttcatagagccgttaggaaacactctgtttgtaaagtctgcaagtggatattcagacctccttgaggccttcgttggaagcgggatttcttcatattatgctagacagaagaattctcagtaacttccttgtgttgtgtgtattcaactcacagagttgaacgatcctttacacagagcatacttgaaacactcttgttgtggaatttgcaagtggagatttcagccgctttgaggtcaatggtagaataggaagtatcttcctatagaaactagacagaatgattctcagaaactcctttgtgatgtgtgcgttcaactcacagagtttaacctttcttttcatagagcagttaggaaacactctgtttgtaatgtctgcaagtggatattcagacctctttgaggccttcgttggaaacgggatttcttcatattatgctagacagaagaattcccagtaacttccttgtgttgtgtgtgttcaactcacagagttgaactttcatttacccagagcagatttgaaacactctttttgtggaatttgcaagtggagatttcaagcgctttgaggccaaaggcagaaaaggaaatatcttcgtttcaaaactagacagcatcattctcagaaactgctctgcgatgtatgcgttcaactctcagagtttaacttttcttttcattcagcagtttggaaacactctgtttgtaaagtctgcacgtggatattttgaccacttagaggccttggttggaaacgggtttttttcatgtaaggctagacagaagaattcccagtaacttccttgtgttgtgtacattcaactcacagagttgaacgttcccttagacagagcagatttgaaacactctttttgtgcaattggcaagtggagatttcaagcgctttaaggtcaatggcagaaaaggaaatatcttcgtttcaaaactaggcagaatcattcccacaaactgcgttgtgatgtgttcgttcaactcacagagtttaacctttccgttcatagagcagttaggaaacacactgtttgtaaagtctgtaagtggatattctgacatcttgtggccttcgttggaaacgggatttcttcatattctgctagacagaagaattctcagtaacttccttgtgttgtgtgtattcaactcacagagttgcacgatcctttacacagagcagacttgaaacactctttttgtggaatttgcaagtggagatttcagccgctttgagttcaatggtagaataggaaatatcttcctatagaaactagacagaatgattctcagaatctcctttgtgatgtgtgcgttcaactcacagagttcaacctttcttttaatagagtagttgggaaacactctgtttgtaaagtctgcaagtggatattcagacttctttgaggccttcgttggaagcgggatttcttcatattctgctagacagaagaattctcagtaacctccttgtgttgtgtgtattcaactcacagagttgaacgaccctttacacagagcagacttgaaacactctttttgtggaatttgcaagtggagatttcagccgctttgaggtcaatggtagaataggaaatatcttcctatagaaactagacagaatcattctcagaaactgctgcgtgatgtgtgcgttcaactctcagagtttaacttttcttttcattcagcggtttggaaaccctctgtttgtaaagtctgcacgtggatattttgaccacttagaggccttcgttggaaacgggttttttgtatgtaaggctagacagaagaattcccagtaacttccttgtgttgtgtgcattcaactcacagagttgaacgttcccttagacagagcagatttgaaacactctatttgtgcaatttgcaagtgtagatttcaagcgctttaaggtcaacggcagaaaaggaaatatcttcgtttcaaaactagacagaatgattctcagtaaactcctttgtgacgtgtgcgttcaactcacagagtttaacctttctgttcatagagcagttaggaaacactctgtttgtaaagtctgcaagtggatattcagacctccttgaggccttcgttggaaacgggatttcttcatattctgatagacagaagaattctcagtaacttcccttgtgttgtgtgtattcaactcacagagttgaacgatcctttacacagagcagacttgaaacactctttttgtggaatttgcaagtggagatttcagccgctttgaggtcaatgttagaataggaaatatcttcctatagaaactagacagaaatgattctcagaaactcctttgtgatgtgtgcgttcaactcacagagtttaacctttcttttcatagagcagttaggaaacactctgtttgtaaagtctgcaagtggatattcagacctgtttgaggccttcgttggaaacgggtttttttcatataaggctagacagaagaattctcaggaacttccttgtgttgtgtgtattcaactgacagagttgaactttcatttagagagagcagatttgaaacactgtttttgtggaatttgcaagtggagattccaagcgctttggggccaaaggcagaaaaggaaatatcttcgtagaaaaactagacagaatcattctcagaaactgctctgcgatatgtgcgttcaactctcagagtttaacttttcttttcattcagcagtttggaaacactctgtttgtaaagtctgcacgtggatattttgaccacttagaggccttcgttggaaacgggtttctttcctgtaaggctagacagaagaattcccagtaacttccttgtgttgtgtacattcaacacacagatttgaacgttcccttagacagagctgatttgaaacactctttttgtgcaattggcaagtggagatttcaagcgctttaaggtcaatggcagaaaagtaaatatcttcgtttcaaaactagacagaatcattcccacaaactgcgttgtgatgtgttcgttcaactcacagagtttaacctttcttttcatagagcagttagcaaacagtctgtttgtcaattctgtaagtggatattctgacatcttgtggccttcgttggaaacgggatttcttcatattctgctagacagaagaattctcagtaacttccttgtgttgtgtgtattcaactcacagagttgaatgatcctttacacagagcagacttgaaacactctttttgtggaatttgcaagtggagatttcagccgctttgaggtcaatagtagaaaaggaaatatcttcgtagaaaaactagacagaatgattctcagaaaatcctttgtgatgtgtgcgttcaactcacagagtttaacttttcttttcatagagcagtttggaaacactctgtttgtaaagtctgcaagtggatattcagacctctttcaggccttcgtcggaaacgggatttcttcatattatgctagacagaagaattcccagtaacttccttgtgttgtgtgtgttcaactcacagagttgaactttcatttacacagagcagatttgaaacactctttttgtggaatttgcaaatggagatttcaagcgctttgaggccaaaagcagaaaaggaaatatcttcgtataaaaactagacagaatcattctcagaaactgctgcgtgatgtgtgcgttcaactctcagagtttaactattcttttcattcagcggtttggaaacactctgtttgtaaagtctgcacgtggaaattttgaccacttagaggccttcgttggaaacgggtttttttcatgtaaggctagacagaagaattcccagtaacttccttgtgttgtgtacattcaactcacagagttgaacgttcccttagacagagcagatttgaaatactctttttgtgcaattggcaagtggagatttcaagcgctttaaggtcaatggcataaaaggaaatatcttggtttcaaaactagacagaatcattcccacaaaccgcgttgtgatgtgttcgttcaactcacagagtttaacctttctgttcatagagcagttaggaaacactctgtttgtaaagtctgtaagtggatattctgacaacttgtggccttcgttggaaacgggatttcttcatattctgctagacagaagaattctcagtaacttcccttgtgttgtgtgtattcaactcacagagttgaatgatcctttacacagaacagtcttgaaacactctttttgtggaatttgcaagtggagatttcagccgctttgaggtcaatggtagaataggatatatcttcctatagaaactagacagaatgattctcagaaactactttgtgatgtgtgcgttcaactcacagagtttaacctttcttttcatagagcagttaggaaacactctgtttgtaaagtctgcaagtggatattcagacctctttgaggccttcgttggaaacgggatttcttcatactgtgctagacagaagaattctcagtaacttcccttgtgttgtgtgtattcaactcacagagttgaacgatcctttacacagagcggacttgaaacacactttttgtggaatttgcaagtggagatttcaagcgctttgaggccaaaggcagaaaaggaaatatcttcgtataaaaactagacagaatgattctcagaaactcctttgtaatgtgtgcgttcaactcacagagtttaacctttcttttcatagagcagttaggaaacactctgtttgtaaagtctgcaagtggatattcagacctctttgaggccttcgttggaaacgggttattttcatataaggctagacagaagaattccctttaaattgcttgtgttgtgtgtattcaactgacagatttgaactttcatttagacagagcagatttgaaacactctttttgtgcaatttgcaagtggaaatttcaaacgctttaaggtcaatggcagaaaaggaaatatcttcgtttcaaaactagacagaatcattcccacaaactgcgttgtgctgtgttcgttcaactcacagagtttaacctttcttttcatagagcagttaggaaacactctgtttgtaaactctgcaagtggatattcacacctcttagaggccttcgttggaaacggtatttcttcatattatgctagatagaagaaatctcagtaacttccttgtgttgtgtttattcaactcacagagttgaacgatcctttacacagagcagacttgaaacactctttttgtggaatttgcaagtggagatttcagccgctttgaggtcaatggtagaaaagtaaatatcttcgtataaagactagacagaatgattctcagaaacttcttggtgatgtgtgcgttcaactcacagagtttaacctttcttttcatagagcagttaggaaacactctgtttgtaaactctgcaagtggatattcacacctctttgaggccttcgttggaaacgggatttcttcatactgtgctacacagaagaattctcagtaacttccttgtgtagtgtgtattcaactgacagagttgaactttcatttagagagagcagatttgaaacactgtttttgtggaatttgcaagtggagatttcaagcgctttggggccaaaggcagaaaaggaaatatcttcgtataaaaactagacagaaacattctcagaaactgatgcgtgatgtgtgcgttcaactctcagagtttaacttttcttttcattcagcggtttggaaacactctgtttgtaaagtctgcacgtggaaattttgaccacttagaggccttcgttggaaacgggtttttttcatgtaaggctagacagaagaattcccagtaacttccttgtgttgtgtgcattcaactcacagagttgaacgttcccttagacagagcagatttgaaacactctatttgtgcaatttgcaagtgtagttttcaagctctttaaggtcaacggcagaaaaggaaatatcttcgtttcaaaactagacagaatcattcccacaaactgcgttgtgatgtgtacgttcaactcacagagtttaacctttccgttcatagagcagttaggaaacactctgtttgtaaagtctgtaagtggatattctgacatcttgtggccttcgttggaaacgggatttcttcatattctgcgagacagaagaattctcagtaacttccttgtgttgtgtgtattcaactcacagaagttgaacgatcctttacacagagcagacttgtaacactctttttgtggaatttgcaagtggagatttcagccgctttgaagtcaaaggtagaaaaggaaatatcttcctataaaaactagacagaacgattctcagaaactcctttgtgatgtgtgcgttcaactcacagagtttaacctttcttttcatagagcagttaggaaacactctgtttgtaaagtctgcaagtggatattcagacctctttgaggccttcgttggaaacggggatttcttcatattctgctagacagaagaattctcagtaacttccttgtgttgtgtgtattcaactgacagagttgaactttcatttagagagagcagatttgaaacactgtttttgtggaatttgcaagtggagattacaagcgctttggggccaaaggcagaaaaggaaatatcttcgtataaaaactagacagaatcattctcagaaactgctgcgtgatgtgtgcgttcaactctcagagtttaacttttcttttcattcagcggtttggaaaaactctgtttgtaaagactgcacgtggatattttgaccacttagaggccttcgttggaaacgggttttttttcatgtaaggctagacagaagaattcccagtaacttccttgtgttgtgtacattcaactcacggagttgaacgttcccttagacagagcagatttgaaacactctttttgtgcaattggcaaatggagatttcaagcgctttaagttcaaaggcagaaaaggaaatatcttcgtttcaaaactagacagaatcattcccacaaactgcgttgtgatgtgttcgttcaactcacagagtttaacctttctgttcatagagcagttaggaaacactctgtttgtaaagtctgtaagtggatattctcacatcttgtggccttcgttggaaacgggatttcttcatattctgctagacagaagaattctcagtaacttccttgtgttgtgtgtattcaactcacagagttgaacgatcctttacacagagcagacttgtaacactctttttgtggaatttgcaagtggagatttcagccgctttgaagtcaaagtagaaaaggaaatttcttcctataaaaactagacagaatgattctcagaaactcctttgacatgtgtgcgttcaactcacagagtttaacctttcttttcatagagcagttaggaatcactctgtttgtaaagtctgcaagtggatattcagacctctttgaggccttcgttggaaacgggtttttttcatataaggctagacagaagaattcccagtaacttccttgtgttgtgtgtgttcaactcacagagttgaactttcatttacacagagcagatttgaaacactctttttgtggaatttgcaagtggagatttcaattgctttgaggccaaaggcagaaaaggaaatatcttcgtataaaaactagacagaatcattctcagaaactgctctgtgatgtgtgcgttcaactctcagagtttaactttgcttttcattcagcagtttggaaacactctgtttgtaaagtctgcacgtggataatttgaccacttagaggccttcgttggaaacgggtttttttcatgtaaggctagacagaagaattcccagtaacttccttgtgttgtgtgcattcaactcacagagttgaacgttcccttagacagagcagatttgaaacactctatttgtgcaatttccaagtgtagatttcaagcgctttaaggtcaacggcagaaaaggaaatatcttcgtttcaaaactagagagaatcattcccacaaactgcgttgtgatgtgttcgttcaactcacagagtttaacctttctgttcatagagcagttaggaaacactctgtttgtacagtctgccagtggatattcagacctccttgaggccttcgttggaaacgggatttcttcatattctgctagacagaagaattctcagtaacttccttgtgttgtgtgtattcaactcacagagttgcacgatcctttacacagagcagacttgtaacactctttttgtggaatttgcaagtggagatttcagccgctttgaagtcaaaggtagaaaaggaaatatcttcctataaaaactagacagaatgattctcagaaactcctttgtgatgtgtgcgttcaactcacagagtttaacctttcttttcatagagcagttaggaaacactctgtttgtacagtctgcaagtggatattcagacatccttgaggctttcgttggaaacgggatttcttcatattctgctagacagaagaattctcagtaacttccttgtgttgtgtgtattcaactgtcagagttgaactttcatttagagagagcacatttgaaacactgtttctgtggaatttgcaagtggagatttcaaacgctttggggccaaaggcagaaaaggaaatatcttcgtataaaaactagacagaatcatactcagaaactgctgcgtgatgtgtgcgttcaactctcagagtttaacttttcttttcattcaacggtttggaaacactctgtttgtaaagtctgcacgtggatattttgaccacttagaggccttcgttagaaacgggttttttcatgtaaggctagacagaagaattctcagaaacttcgttgtgttgtgtgttttcaactcacagagttcaacgatcctttacacagagtagacttgaaacactctttttgtggaattggcagggtggagatttcagccgctttgaggtcagtggtagaaaaggaaatatcttcgtataaaaactagacagagtgattctcagaaactcctttgtgatgtctgcgttcaactcacagagtttaacctttcttttcatagagcagttaggaaacactgtgtttgtaaagtctgcaagtggatattcagacctccttgaggccttcgttggaaacgggatttcttcatattctgctatacagaagaattctcagaaacttccttgtgttgtgtgtattcaactcacagagttgaacgatcctttacacagagcagacttgaaacactctttttgtggaatttgcaagtggagatttcagccgctttgaggtcaatggtagaataggaaatatcttcctatagaaactagacagaatgattctcagaaactcctttgtgatgtgtgcgttcaactcacagagttcaacctttcttttcatagagcagttgggaaaaactctctttgtaaagtctgcaagtggatattcagacttctttgaggccttcgttggaagcggggtttcttcatattctcctagacagaagaattcccagtaacttccttgtgttgtgtgtgttcaactcacagagttgaactttcatttacacagagcagatttgaaacactctttttgtggaatttgcaagtggagatttcaagcgctttgaggccaaaggcagaaaaggaaatatcttcgtttgaaaactagacagaatcattctcagaaaatgctctgtgatgtgtgcgttcaactctcagagtttaacttttgttttcattcagcagtttggaaacactctgtttgtaaagtctgcacgtggatattttgaccacttagaggccttcgttggaaacgggtttttttcatgtaagggtagacagaagaattcccagtaacttccttgtgttgtgtacattcaactcacagagttgaacgttcccttagacagagcagatttgaaacactctttttgtgcaattggcaaatggagatttcaagcgctttaaggtcaatggcagaaaaggaaatatcttcgtttcaaaactagacagaatcattcccacaaactgcgttgtgatgtgttcgttcaactcacagagtttaacctttcttttcatagagcagttaggaaacagtctgtttgtaaattctgtaagtggatattctgacatccttgtggccttcgttggaaacgggatttcttcatattctgctagacagaagaattctcagtaacttccttgggttgtgtttattcaactcacagagttgaatgatcctttacacagagcagacttgaaacactctttttgtggaatttgcaagtggagatttcagccgctttgaggtcaatggtagaaaagtaaatatcttcgtataaagactagacagaatgattgtcagaaactcctttgtgatgtgtgcgttcaactcacagagtttaacctttcttttcatagagcagttaggaaacactctgtttgtaaagtctgcaagtggatattcagacctccttgaggccttcgttggaaacgggatttcttcatattctgctagacagaagaattctcagtaacttccttgtgttgtgtgtattcaactgacagagttgaactatcatttagagagagcagatttgaaacactgtttttgtggaatttgtaagtggagatttcaagcgctttggggccaaaggcagaaaaggaaatatcttcgtataaaaactagacagaatcattctcagaaactgctgcgtgatgtgtgcgttcaagtctcagagtttaacttttcttttcattcagcggtttggaaacactctgtttgtaaagtctgcacgtggaaattttgaccacttagaggccttcgttggaaacgggtttttttcatgtaaggctagacagaagaattcccagtaacttccttgtgttgtgtgcattcaactcacagagtggaacgttcccttagacagggcagatttgaaacactctatttgtgcaatttgcaagtgtagatttcaagcgctttaaggtcaacggcagaaaaggaaatatcttcttttcaaaactagacagaatcattcccacaaactgcgttgtgatgtgttcgttcatctcacagagtttaacctttcttttcgtagagcagttaggaaacagtctgtttgtaaattctgtaagtggatattctgacatcttgtggccttcgttggaaacgggatttcttcatactgtgctagacagaagaattctcagtaacttccttgtgttctgtgtattcaactcacagagttgaacgatcctttacacagagcagacttgaaacactctttttgtggaatttgcaagtggagatttcagccgctttgaggtcaatggtagaataggaaatatctttctatagaaactagacagagtgattctcagaaactcctttgtgatgtctgcgttcaactcacagagtttaacctttcttttcatagagcagttaggaaacactctgtttgtaaagtctgcaagtggatattcagacctccttgaggccttcgttggaaatgggatttcttcatattctgctatacagaagaattctcagtaacttccttgtgttgtgtgtattcaactcacagagttgaacgatcctttacacagagcatacttggaacactcttcttgtggaatttgcaagtggagatttcagccgctttgagatcaatggtagaataggaaatatcttcgtataaaaactagacagaatcattctcagaaactgctctgtgatgtgtgcgttcaactctcaaagtttaacttttcttttcattcagcagtttggaaacactctgtttgtaaagtctgcacgtggatattttgaccacttagaggccttcgttggaaacgggttttttttcatgtaaggctagacggtagaattcccagtaacttccttgtgttgtgtgcattcaactcacagagttgaacgttcccttagacagagcagatttgaaacactctatttgtgcaatttgcaagtgtagatatcaagcgctttaaggtcaatggcagaaaaggaaatgtcttagtttcaaaactagacagaatgattctgagaaaatcctttgtgatttgtgcgttcaactcacagagtttaacctttcttttcatagagcagttaggaaacactctgtttgtaaagtctgcaagtggatattcagacctccttgaggccttcgttggaaacgggatttcttcatattatgctagacagaagaattctcagtaacttccttgtgttgtgtgtattcaactcacagagttgaacgatcctttacacagagcagacttgaaacactctttttgtggaatttgcaagtggagatttcagccgctttgaggtcaatggtagaataggaaatatcttcctatagaaagtagacagaatgattctcagaaattactttgtgatgtgtgcgttcaactcacagagtttaacctttcttttcatagagcagttaggaaacactctgtttgtaaagtctgcaagtggatattcagacatctttgaggctttcgttggaaacgggatttcttcttattctgctatacagaagaattctcagtaacttccttttgttgtgtgtattcaactgacagagttgaactttcatttagacagagcagatttgaaacattctttttgtggaatttgcaagtggagatttcaagcgctttgaggccaaaggcagaaaaggatatatcttcgtataaaaactagacagaatcattctcagaaactgctgcgtgatgtgtgcgttcaactctcagagttgaacttttcttttcattcagcggtttggaaacactctgtttgtaaagtctgcacgtggaaattttgaccacttagaggccttcgttggaaacgggtttttttcatgtaaggctagacagaagaattcccagtaacttccttgtgttgtgtacattcaactcacagagttgaacgttcccttagacagagcagatttgaaacactctttttgtgcaattggcaaatggagatttcaagcgctttaaggtcaatggcagaaaaggaaatatcttcgtttccaaactagacagaatcattcccacaaactgcgttgtgatgtgttcgttcatctcacagagtttaacctttcttttcgtagagcagttaggaaacagtctgtttgtaaattctgtaagtggatattctgacatcttgtggccttcgttggaaacgggatttcttcatattctgctagacagaagaattctcagtaacttccttgtgttgtgtgtattcaactcacagagttgaacgatcctttacacagagcagacttgaaacactctttttgtggaatttgcaagtggagatttcagccactttgaggtcaatgttagaataggaaatatcttcctatagaaactagacagaatgattctcagaaactcctttgtgatgtgtgtgttcaactcacagagtttaacctttcttttcatagagcagttagtaaacactctgtttataaagtctgcaagtgaatattcagacccctttgagggcttcgttggaaacgggatttcttcatattatgctagacagaagaattcccagtaacttccttgtgttgtgtgtgttcaactcacagagttgaactttcatttacacagagcagatttgaagcactctttttgtggaatttgcaagtggagatttcaagcgctttgaggccaaaggcagaaaaggaaatatcttcgtttcaaaactagacagaatcattctcagaaactgctctgcgatgtgtgcgttcaactctcagaagtttaacttttcttttcattcagcagtttgaaaacactctgtttgtaaagtctgcacgtggataatttgactacttagaggccttcgttggacacgggtttttttcatgtaaggctagacagaagaattcccagtaacttccttgtgttgcgtacattcagctcacagagttgaacgttcccttagacagagcagatttgaaacactctttttgtgcaattggcaagtggagatttcaagcgctttaaggtcaatggcagaaaaggaaatatcttcgtttcaaaactagacagaatcattcccacaaactgcgttgtgatgtgttcgttcaactcacagagtttaacctttcttttcatagagcagttaggaaacagtctgtttgtaaattctgtaagtggatattctgacatcttgtggccttcgttggaaacaggatttcttcatattctgctagacagaagaattctcagtaacttccttgtgttgtgtgtattcaactcagagagttgaacgatcctttacacagagcagacttgaaacactctttttgtggaatttgcaagtggagatttcagccgctttgaggtcaatggtagaataggaaatatcttcctatagaaactagacagaatgattctcagaaactcctttgtgatgtgtgcgttcaactcacagactttaacctttcttttcatagagcagttaggaaacactctgtttgtaaagtctgcaagtggatattcagacatctttgaggctttcgttggaaacgggttttcttcatattctgctatacagaagaattctcagaaacttccttgtgttgtgtgtcttcaactcacagagttgaacgatgctttacacagagcagacttgaaacactctatttgtggaatttgcaagtggagatttcagccgctttgaggtcaatggtagaataggaaatatcttcttatagaaactagacagaatcattctcagaaactgctctgtgatgtgtgcgttcaactctcagagtttaacttttcttttcattcagtagtttggaaacactctgtttgtaaatctgcacgtggatattttgaccacttagaggctttcgttggaaacgggtttttttcatgtaaggctagacagaagaattcccagtaacttccttgtgttgtgtgcattcaactcacagagttgaacgttcccttagacagagcagatttgaaacactctatttgtgcaatttgcaagtgtagatttcaagcgctttaaggtcaacggcagaaaaggaaatatcttcgtttcaaaactagatagaatcattcccacaaactgcgttgcgatgtgttcgttcaactcacagagtttaacatttcttttcatagagcacttaggaaacagtctgtttgtaaattctgtaagtggatattctgacatcttgtggccttcgttggaaacaggatttcttcatattctgctagacagaagaattctcagtaacttctttgtgttgtgtgtattcaactcacagagttgaacgatcctttacacagagcagacttgaaatactcgttttgtggaatttgcaagtggagatttcagccactttgaggtcaatggtagaaaaggaaatatcttcgtataaatactagacagaatgattctcagaaactcctttgtgatgtgtgcgttcaactcacagagtttaacttttcttttcatagagcagttaggaaacactctgtttgtaaagtctgcaagtggatattcagagctcctttgaggccttcgttggaaacgggatttcttcatattctgctagacagaataattctcagtaacttccttgtgttgtgtgtattcaagtcacagagttgaacgatcctttacagagagcagacttgaaacactctttttgtggaatttgcaattggagatttcaaccgctttgaggtcaatagtagaaaaggaaatatcttcgtagaaaaactagaaagaatcattctcagaaactgctctgcgatgtgtgcgttcaactctcagagtttaacttttcttttcattcaacagtttggaaacactctgtttgtaaagtctgcacgtggataatttgaccacttagaggccttcgttggaaacgggtttttttcctgtaaggctagacagaagaattcccagtaacttccttgtgttgtgtacattcaactcacagagttgaacgttcccttagacagagcagatttgaaacactctttttgtgcaattggcaagtggtgatttcagccgctttgaggtcaatggtagaaaaggaaatatcttcgtataaaaactagacagaatgattctcagaaacttctttgtgacgtgtgcgttcaactcacagagtttaacctttcttttcatagagcagttaggaaacactctgtttgtaaagtctgcaagtggatattcagacctcctcgaggctttcgttggaaacgggatttcttcatattgtgctagacagaagaattctcagtaacttccttgtgttgtgtgtattcaactcacagagttgaacgatcctttacacagagccgacttgaaacactctttttgtggaatttgcaagtggagatttcagccgctttgaggtcaatggtggaaaaggaaatatcttcgtataaaaactagacagaatgattctcagaaactcctttgtgatgtgtgcgttcaactcacagaggttaacctttcttttcatagagcagttaggaaacactctgtttgtaaagtctgcaagtggatattcagacctctttgaggccttcgttggaaaagggtttttttcatataaggctagacagaagaattcccagtaacttccttgtgttgtgtgtgttcaactcacagagttgaactttcatttacacagagcagatttgaaacactctttttgtggaatttgcaagtggagatttcaagcgctttgaggccaaatgcagaaaaggaaatatcttcatataaaaactagacagaatcattctcagaaactgctctgcgaatgtgtgcgttcaactctcagagtttaacttttcttttcattcagcagtttggaaacactctgtttgtaaagtctgcacgtggataatttgaccacttagaggccttcgttggaaacgggtttttttcatgtaaggctagacagaagaattcccagtaactttccttgtgttgtgtacattcaactcacagagttgaacgttcccttagacagagcagatttgaaacactctttttgtgcaattggcaagtggtgatttcagccgctttgaggtcaatggtagaaaaggaaatatcttcgtataaaaactagacagaatcattcccacaaactgcgttgtgatgtgttcgtccaactcacagagtttaacctttctgttcatagagcagttaggaaacactctgtttgtaaagtctgtaagtggatattctgatatcttgtggccttcgttggaaacgggatttcttcatattctgctagacagaataattctcagtaacttccttgtgttgtgtgtattctactcacagagttgaacgatcctttacacagagcagacttgaaacactctttttgtggaatttgcaagtggagatttcagccgctttgaggtcaatggtagaataggaaatatcttcctatagaaactagaccgaatgattctcagaaactcctttgtgatgtgtgcgttcaactcacagagtttaacctttcttttcattgagcagttaggaaacactctgtttgtaaagtctgcaagtggatattcagacctccttgaggacttcgttggaaacgggatttcttcatattatgctagacagaagaattcccagtaacttccttgtgttgtgtgtgttcaactcacagagttgaactttcatttacacagagcagatttgaaacactctttttgtgtaatttgcaagtggagatttcaagcgctttgaggccaaaggcagaaaaggaaatatcttcgtttcaaaactagacagaatcattctcagaaactgctctgtgatgtgtgcgttcaactctcagagtttaacttttcttttcattcagcagtttggaaacactctctttgtaaagtctgcacgtggatattttgaccacttggaggccttcgttggaaacgggtttttttcatgtaaggctagacaggagaattctcagtaacttccttgtgttgtgtacattcaactcacagagttgaacgttcccttagacagagcagatttgaaacactctttttgtgcaattggcaagtggtgatttcagccgctttgaggtcaatggtagaaaaggaaatatcttcgtataaaaactagacagaatgattctcagaaactcctttgtgatgtgtgcgttcaactcacagagtttaacatttcttttcatagagcagttaggaaaaactctgtttgtaaggtctgcaagtggatattcagacatctttgaggctttcgttggaaacgggttttcttcatattatgctagacagaagaattctcagaaacttccttgtgttgtgtgttttcaactcacagagttgaacgatgctttacacagagtagacttgaaacactctttttgtggaatttgcaagtggagatttcagccgctttgaggtcaatggtagaataggaaatatcttcctatagaaactagacagaacgattctcagaaactcctttgtgatgtgtgcgttcaactcacagagtttaacctttcttttcatagagcaattaggaaacactctgtttgtaaagtctgcaagtggatattcagacctctttgaggccttcgttggaaacgggatttcttcatattctgctagacagaagaattcccagtaactttcttgtgttgtgtgtgttcaactcacagagttgaactttcatttacacagagcagatttgaaacactctttttgtggaatttgcaaatggagatttcaagcgctttgaggccaaaggcagaaaaggaaatatcttcgtataaaaactagacagaatgattctcagaaactcctttgtgatgtgtgcgttcaactcaccgagtttaacctttcttttcatagagcagttaggaaacactctgtttgtaaagtctgcaagtggatattcagacctctttgaggccttcgttggaaacggctatttttcatataaggctagacagaagaattcccagtaacttccttgtgttgtgtacattcaactcacagagttgaacgttcccttagacagagcagatttgaaacactctttttgtgcaattggcaagtggagatttcaagcgctttgaggtcaatggcagaaaaggaaatatcttcgtttcaaaactagacagaatcattcccacaaactgcgttgtgatgtgttcgttcaactcacagagtttaacctttctgttcatagagcagttaggaaacactctgtttgtaaagtctgtaagtggatactctgacatcttgtggccttcgtaggaaacgggatttcttcatattctgctagacagaagaattgtcagtaacttccttgtgttgtgtgtattcaactcacagagttgaacgatcctttacagagagcagacttgaaacactctttttgtggaatttgcaagtggagatttcagccgctttgaggtcaatagtagaaaaggaaatatcttcacagaaaaactagacagaatgattctcagaaacttctttgttatgtgagcattcaactcacagagttgaacctatcttttgattgagcagttttgaatctctcattttgcagaatctgcaaggggatatttggagccctttgcggcctatggtggaaaaggaaataccttcaaatgaaaagcacacagaagaattctcagtaacttccttgtgttctgtgtattcaactgacagagttgtactttcgtttagagagagcagatttgaaacactgtttttgtggaatttgcaagtggagatttcaagcgctttggggccaaaggcagaaaaggaaatatcttcgtataaaaactagacagaatcattctcagaaactgctctgcgatgtgtgcgttcaactctcagagtttaatttttcttttcattcagcagtttggaaacactctgtttgtaaagtctgcacgtggataacttgaccacttagaggccttcgttggaaacgggtttttttcacgtaaggctagacagaagaattcccagtaacttcattgtgttgtgtgcattcaactcacagagttgaacgttcccttagacagagcagatttgaaacactctatttatgcaatttgcaagtgtagatttcaagcgctttaaggtcaatggcagaaaaggaaatatcttcgtttcaaaactagacagaatgattctcagaaactcctttgtgatgtgtgcgttcaactcacagagtttaacctttcttttcatagagcagttaggaaacactctgtttgtaaattctgtaagtggatattctgacatcttgtggccttcgttggaaacgggatttcttcatattctgctagacagaagaattctcagtaacttccttgtgttgtgtgtattcaactcacagagttgaatgatcctttacacagaacagacttgaaacactcttgttgtggaatttgcaagtggagaattcagccgctttgaggtcaacggtagaataggaaatatcttcctatagaaactagacagaatgattatcagaaactcctttgtgatgtgtgcgttcaactcacagagtttaacctttcttttcatagagcagttaggaaacactctgtttgtaaagtctgcaagtggatattcagacatccttgaggctttcgttggaaacgggatttcttcatattctgctagaaagaagaattctcagtaacttccttgtgttgtgtgtattcaactcacagagttgaacgatcctttacacagagcagacttgaaacactctttttgtgtaatttgcaagtggagatttcagccgctttgaggtcaatggtagaaaaggaaatatcttcgtataaaaactagacagaatgattctcagaaactcctttgtgatgtgtgcgttcaactcacagaatttaacctttcttttcatagagcagttaggaaacactctgtttgtaaagtctgcaagtggatattcagacctccttgaggccttcgttggaaacgggatttcttcatattatgctagacagaagaattcccagtaacttccttgtgttgtgtgcattcaactcacagagttgaacgttcccttagacagagcagatttgaaacactctatttgtgcaatttccaagtgtagatttcaagcgctttaaggtcaacggcagaaaaggaaatatcttcgtttcaaaactagacagaatcattcccacaaacagcgttgtgatgtgttcgttcaactcacagagtttaaccctttctgttcatagagcagttaggaaacactctgtttgtaaagtctgtaagtggatattctgacatcttgtggccttcgttggaaacgggatttcttcatattctgctagacagaagaattctcagtaacttccttgtgttgtgtgtattcaactcacagagttgaacgatcctttacacagagcagacttgaaacactctttttgtggaatttgcaagtggagatttcagccgctttgaggtcaacggtagaaaaggaaatatcttcgtataaaaactagacagaatgattctcagaaactcctttgtgatgtgtgtgttcaactcacagattttaacctttcttttcatagagcagttaggaaacactctgtttgtaaagtctgcaagtggatattcagacctctttgaggtcttcgttggaaacgggtttttttcatataaggctagacagaagaattcccagtaacttccttgtgttgtgtgtgttcaactcacagagttgaactttcatttacacagagcagatttgaaacactctttttgtggaatttgcaagtggagatttcaagcgttttgaggccaaaggcagaaaaggaaatatcttcgtttcaaaactagacagaatcattctcagaaactgctctgcgatgtgtgcgttcaactctcagagtttaacttttcttttcatttagcagtttggaaacactctgtttgtaaagtctgcacgtggatattttgaccacttagaggccttcgttggaaacgggtttttttcctgtaaggctagacagaagaattcccagtaacttccttgtgttgtgtacattcatctcacagagttgaacgttcccttagacagagcagatttgaaacactctttttgtgcaattggcaagtggagatttcaagcgctttaaggtcaatggcagaaaaggaaatatcttcgtttcaaaactagacagaatcattcccacaaactgcgttgtgatgtgttcgttcaactcacagagtttaacctttgttttaatagaggagttaggaaacagtctgtttgtaaattctgtaagtggatattctgacatcttgtggccttcgttggaaacgggatttcttcatattctgctagacagaagaattctcagaaactttccttgtgttgtgtgttttcaactcacagagttgaacgatgctttacacagagtagacttgaaacactctttttgtgtaatttgcaagtggagatttcagccgctttgaggtcaatggtagaaaaggaaatatcttcgtataaaaactagacagaatgattctaagaaactcctttgtgatgtgtgcgttcaactcacagagtttaacctttcttttcatagagcagttaggaaacactctgtttgtaaagtctgcaagtggatattcagacatctttgaggctttcgttggaaacgggatttcttcatattctgctagacagaagaattctcagaaacttcgttgcgttgtgtgttttcaactcacagagttcaacgatcctttacacagagtagacttgaaacactctttttgtggaattggcagggtggagatttcagccgctttgaggtcaatggtagaaaaggaaatatcttcgtataaaaactagacagaatcattctcagaaactgctgcgtgatgtgtgcgttcaactctcagagtttaacttttcttttcattcagcggtttggaaacactctgtttgtaaagtctgcatgtggaaattttgaccacttagaggccttcgttggaaacgggtttttttcatgtaaggctagacagaagaattctcagtaacttccttgtgttgtgtgtattcaactcacagagttgaacgatcctttacacagagcagacttgaaacactctttttgtggaatttacaagtggagatttcagccgctttgaggtcaatggtagaaaaggaaatatcttcgtataaagactagacagaatgattctcagaaactcctttgtgatgtgtgcgttcaactcacagagtttaacttttcttttcatagagcagttaggaaacactctgtttgtaaagtctgcaagtggatattcagacctctttgacgccttcgttggaaacgggatttcttcatattatgctagacagaagaattctcagtaacttccttgtgttgtgtgtattcaactcacaggagttgaacgatcctttacacagagcagacttgaaacactctttttgtggaatttgcaagtggagatttcagccgctttgaggtcaatggtagaaaaggaaactatcttcatataaagactagacagaatgattctcataaactcctttgtgatgtgtgcgttcaactcacagagtttaacctttcttttcatagagcagttaggaaacactctgtttgtaaagtctgcaagtggatattcagacccctttgaggccttcgttggaaacgggatttcttcatattatgctagacagaagaattcccagtaacttccttgtgttgtgtgtgttcaactcacagagttgaactttcatttacacagagcagatttgaaacactcattttgtggaatttgcaagtggagatttcaagcgcttgtgaggccaaaggcagaaaaggaaatatcttcagtataaaaactagacagaatcattctcagaaactgctctgcgatgtgtgcgttcaactctcagagtttaacttttcttttcattcaacagtttggaaacactctgtttttaaagtctgcacgtggataacttgaccacttagaggccttcgttggaaacgggtttttttcatgtaaggctagacagaagaattcccagtaacttccatgtgttgtgtgcattcaactcacagagttgaacgttcccttagacagagcagatttgaaacactctatttgtgcaatttgcaagtgtagatttcaagcgctttaagatcaatggcagaaaaggagatatcttcgtttcaaaactagacagaatcattcccacaaactgcgttgtgatgtgttcgttcaactcacagagtttaacctttcttttcatagagcagttaggaaacagtctgtttgtcaattctgtaagtggatattgtgacatcttgtggccttcgttggaaacgggatttcttcatattctcctagacagaagaattctcagtaacttccttgtgttgtgtgtattcaactcacagagttgaacgatcctttacagagagcaggcttgaaacactctttttgtcgaatttgcaagtggagatttcagccgctttgaggtcaatggtagaataggaaatgtcttcttatagaaactagacagaatgattctcagaaaatcttttctgtgtgtgcgttcaactcacagagtttaacttttcttctcatagagcagttaggaaacactctgtttgtaaagtgtgcaagtggatattcagacctctttgaggccttcgttggaaacgggatttcttcatattatgctagacagaagaattctcagtaacttccttgtgttgtgtgtattcaactgacagagttgaactttcatttagagagagcagatttgaaacactgtttttgtggaatttgcaagtggagatttcaagtgctttggggccaaaggcagaaaacgaaatatcttcgtataaaaagtagacagaatcattctcagaaactgctctgcgatgtgtgcgttcaactctcagagtttaacttttcttatcattcagcagtttggaaacactctgtttgtaaagtctgcacgtggataatttgaccacttagaggccttcgttggaaacgggtttttttcctgtaaggctagacagaagaattcccagtaacttccttgtgttgtgtacattcaactcacagagttgaacgttcccttagacagagcagatttgaaacactctttttgtgcaattggcaagtggagatttcaagcgctttaaggtcaatggcagaaaaggaaatatcttcgtttcaaaactagacagaatcattcccacaaactgcgttgtgatgtgttcgttcatctcacagagtttaacctttcttttcgtagagcagttaggaaacagtctgtttgtaaattctgtaagtggatattctgacatcttgtggccttcgtgggaaacgggatttcttcatattctgctagacagaagaattctcagaaacttccttgtgttgtgtgtattcaactcaaagagttgaacgatcgtttacacagagcagacttgagacactctttttgtggaatttgtaagtggagatttcagccgctttgaggtcaatggtagaaaaggaaatatcttcatataaaaactagacagaatgattctcagaaacgtcctttgtgatgtgtgcgttcaactcacagagtttaacctttcttttcatagagcagttaggaaacactctgtgtgtaaagtctgcaagtggatattcagacctccttgaggccttcgttggaaacgggatttcttcatattctgctagacagaagaattgtcagtaacttccttgtgttgtgtgtattcacctcacagagttgaacgatcctttacacagagcagacttgaaacactctttttgtggaatttgcaagtggagatttcagccgctttgaggtcaatggtagaaaaggaaactatgttcgtatacagactagacagaatcattctcagaaactgctgcgtgatgtgtgcgttcaactcacagagtgtaagttttcttttcattcagcggtttggaaacactctgtttgtaaagtctgcacgtggatattttgaccacttagaggccttcgttggaaacgggattttttcatgtaaggctagacagaagaattcccagtaacttccttgtgttgtttgcattcaactcacagagttgaacgttcccttagacagagcagatttgaaacactctatttgtgcaatttgcaagtgtagatttcaagcgctttaaggtcaatggcagaaaaggaaatatcttcgtttcaaaactagacagaatcattctcagaaactgctctgcgatgtgtgcgttcaactctcagagtttaacttttcttttcattcagcagtttggaaacagtctgtttgtaaagtctgcacatggataacttgaccacttagaggccttcgttggaaacgggtttttttcatgtaaggctagacagaagaattctcagtaacttccttgtgttgtgtgtattcaactcacagagttgaacgatcctttacacagagcagacttgtaacactctttttgtggaatttgcaagtggagatttcagccactttgaagtcaaaggtagaaaaggaaataacttcctataaaaactagacagaatgattctcagaaaatcttttgtgatgtgtgcgttcaactcacagagtttaacttttcttctcatagagcagttaggaaacactctgtttgtaaagtctgcaagtgtatattcagacctctttgaggccttcgttggaaacgggatttcttcatattatgctagacagaagaattctcagtaacttccttgtgttgtgtgtattcaactcacagagttgaaggatcctttacagagagcaggcttgaaacactctttttgtcgaatttgaaagtggagatttcagccgctttgaggtcaatggtagaataggatatatcttcttatacaaactagacagaatcattctcagaaactgctctgcgaagtgtgcgttcaactctcagagtttaacttatcttttcattcagcagtttggaaacactctgtttgtaaagtctgcacgtggataatttgaccacttagaggtcttcgttggaaacgggtttttttcatgtaaggctagacagaagaattcccagtaatttccttgtgttgtgtacattcaactcacagagttgaacgttcccttagacagagcagacttgtaacactctttttgtggaatttgcaagtggagatttcagccgctttaaagtcaaaggtagaaaaggaaatatcttcctataaaaactagacagaatcattcccacaaactgcgttgtgaagtgttcgttcaactcacagagtttaacctttctgttcatagagcagttaggaaacactctgtttgtaaagtctgaaagtggatattctgacatcttgtggccttcgttggaaacgggatttctgcatattctgctagacagaagacttctcagtaacttccttgtattgtgtgtattcagctcacagagttgaacgatcctttacacagagcagacctgaaacactctttttgtggaatttgcaagtggagatttcagccgctttgaggtcaatggtagaataggaaatatcttcctatagaaactagacagaatgattctcagaaacttctttgtgatgtgtgcgttcaactcacacagtttaacctttcttttcatagagcagttaggaaacactctgtttgtaaagtctgcaagtggatattcagacctccttgaggccttcgttggaaacgggatttcttcatattatgctagacagaagaattctcagtaacttccttgtgttgtgtgtattcaactgacagagttgaactttcatttagagagagtagatttgtaacactgtttttgtggaatttgcaagtggagatttcaagcgctttggggccaaaggcagaaaaggaaatatcttcgtataaaaactagacagaatcattctcagaaactgctctgcgatgtgtgcgttcaactctcagagtttaacttttcttttcattcagcagtttggaaacactctgtttgtaaagtctgcacgtggatattttgaccacttagaggccttcgttggaaacgggtttttttcctgtaaggctaaaaagaagaattcccagtaacttccttgtgttgtgtgcattcaactcacagagttgaacgttcccttagacagagcagatttgaaacactctatttgtgcaatttgcaagtgtagatttcaagcgctttaaggtcaacggcagaaaaggaaatatcttcgtttcaaaactagacagaatgattctcagaaactcctttgtgatgtgtacgttcaacacacagagtttaacttttcttttcatagagcagttaggaaacactctgtttgtaaagtctgcaagtggatattcagacctctttgaggccttcgttggaaacgggatttcttcatattatgctagacagaagaattctcagtaacttccttctgttgtgtgtattcaactcacagagttgaacgatcctttacagagagcagacttgaaacattctttttgtggaatttgcaagtggagatttcagccgctttgaggtcaattgtagaaaaggaaatatcttcgtataaagactagacagaatgattctcagaaactcctttgtgatgtgtgcgttcaactcacagagtttaacctttcttttcatagagcagttaggaaacactctgtaaagtctgcaagtggatattcagacctccttgaggccttcgttggaaacgggatttcttcatattctgctatacagaagaattcccagtaacttccttgtgttgtgtgtgttcaactcacagtgttgaactttcatttatacagagcagattggaaacactctttttgtggaatttgcaagtggagatttcaagcgctttgaggccaaaggcagaaaaggaaatatcttcgtataaaaactagacagaaatcattctcagaaactgctgcgtgatgtgtgcgttcaactctcagagtttaacttttcttttcattcagcggtttggaaacactctgtttgtaaagtctgcatgtggaaattttgaccacttagaggccttcgttggaaacgggtttttttcatgtaaggctagacagaagaattcccagtaacttccttgtgttgtgtgcattcaagtcacagagttgaacgttcccttagacagagcagatttgaaacactctatttgtgcaatttgcaagtgtagatttcaagcgctttaaggtcaacggcagaaaaggaaatatcttcgtttcaaaactagacagaatcattcccacaaaccgcgttgtgatgtgttcgttcaactcacagagtttaacctttctgttcatagagcagttaggaaacactctgtttgtaaagtctgccagtggatattcagacctccttgaggccttcgttggaaacgggatttcttcatattctgctagacagaagaattctcagtaacttccttgtgttatgtgtattcaactcacagagttgaacgatcctttacacagagcacacttgaaacactctatttgtagaatttgcaagtggagatttcagccgctttgaggtcaatagtagaaaaggaaatatcttcgtagaaaaactagacagaatgattctcagaaactcctttgtgatgtgtgtgttcaactcacagagttcaacctttcttttcatagagcagttagtaaacactctgtttataaagtctgcaagtggatattcagacccctttgaggccttcgttggaaacgggatttcttcatattatgctagacagaagaattctcagtaacttctttgtgttgtgtgtattcaactgacagatttgaactttcatttagagagagcagatttgaaacactgtttttgtggaatttgcaagtggagatttcaagcgctttggggccaaagtcagaaaaggaaatattcttcgtataaaaactagacagaatcattctcagaaactgctctgcgatgtgtctgttcaaagctcagagtttaacttttcttttcattcagcagtttggaaacactctgtttgtaaaatctgcacgtggataacttgaccacttagaggccttcgttggaaacgggtttttttcatgtaaggctagacagaagaattcccagtaacttccttctgttgtgtacattcaactcacagagttgaacgttcccttagacagagcagatttgaaacactctttttgtgcaattggcaaatggagatttcaagcgctttaaggtcaatggcagaaaaggaaatatcttcgtttcaaaactagacagaatgattctcagaaacttctttgtgatgtgtgcgtccaactcacagagtttaacctttcttttcatagagcagttaggaaacactctgtttgtaaagtctgcaagtggataatcagacctctttgaggccttcgttggaaacgggatttcttcatactatgctagacagaagaattctcagtaacttccttgtgttgtgtgtattcaactcacagagttgaacgatcctttacacagagcagacttgtaacactctttttgtggaatttgcaagtggagatttcagccgctttgaagtcaaagttagaaaaggaaatatcttcctataaaaactagacagaatgattctcagaaactcctttgtgatgggtgctttcaactcacagagtttaacctttcttttcatagagcagttaggaaacactctgtttgtaaagtctgcaagtggatattcagacctcttagaggccttcgttggaaacgggatttcttcatattatgctagacagaagaattctcagtaacttcccttgtgttgtgtgtattcaactgacagagttgaactttcatttagagagagtagttttgaaacactgtttttgtggaatttgcaagtggagatttcaagcgctttggggccaaaggcagaaaaggaaatatcttcgtataaaaactagacagaatcattctcagaaactgctgcgtgatgtgtgcgttcaactctcagagtttaacttttcttttcattcagcggtttggaaacactctgtttgtaaagtctgcacgtggaaattttgaccacttagaggccttcgttggaaacgggtttttttcatgtaaggctagacagaagaattcccagtaacttccttgtgttgtgtgcattcaactcacagagttgaacgttcccttagacagagcagatttgaaacactctatttgtgcaatttgcaagtgtagatttcaagcgctttaaggtcaaaggcagaaaaggaaatatcttcgtttcaaaactagacagaatcattcccacaaactgcgttgtgatgtgttcgttcaactcacagagtttaacctttctgttcatagagcagttaggaaacactctgtttgtaaagtctgtaagtggatattctgacatcttgtggccttcgttggaaacgggatttcttcatatttcgctagacagaagaattctcagtaacttccttgtgttgtgtgtattcaactcacagagttgaacgatcctttacactgagcagacttgaaacattctttttgtggaatttgcaagtggagatttcagccgctttgaggtcaatggtagaataggaaatatcttcctatagaaactagacagaacgattctcagaaactcctttgtgatgtgtgtgttcaactcacagagtttaacctttcttttcatagagcagttaggaaacactctgtttgtaaagtctgcaagtggatattcagacctctttgaggccttcgttggaaacgggatttcttcatattctgctagacagaagaattctcagtaacttccttgtgttgtgtttattcaactgacagagttgaactttcatttagagagagcagatttgaaacactgtttttgtggaatttgcaagtggagatttcaagcgctttggggccaaaggcagaaaacgaaatatcttcgtataaaaactagacagaatcattctcagaaactgctgcgtgatgtgtgcgttcaactctcagagtttaacttttcttttcattcagcggtttggaaacactctgtttgtaaagtctgcacgtggatattttgaccacttagaggccttcgttggaaacgggttttttgcatgtaaggctagacagaaagaattcccagtaacttccttgtgttgtgtgcattcaactcacagagttgaacgttcccttagacagagcagatttgaaacactctatttgtgcaatttgcaagtgtagatttcaagcgctttaaagtcaatggcagaaaaggaaatatcttcgtttcaaaactagacagaatgattctcagaaactcctttgtgatgtgtgtgttcaactcacagagtttaactttccttttcatagagcagttaggaaacactctgtttgtaaagtctgcaagtggatattcagacctctttgaggccttcgttggaaacgggatttcttcatattatgctagacagaagaattctcagtaacttccttgtgttgtgtgtattcaactcacagagttgaacgatcctttacacagagcagacttgaaacagtctttttgtggaatttgcaagtggagatttcagccgctttgaggtcaatggtagaaaaggaaatctcttcgtataaagactagacagaatgattctcagaaactcctttgtgatgtgtgcgttcaactcacagagtttaacctttcttttcatagagcagttaggaaacactctgtttgtaaagtctgcaagtggatattcagacctccttgaggccttctttggaaacgggatttcttcttattctgctaggcagaagatttcccagtaacttccttgtgttgtgtgtgttcaactcacagagttgaactttcatttacacagagcagatttggaacactctttttgtggaatttgcaaatggagatttcaagcgctttgaggccaaaggcagaaaaggaaatatcttcgtataaaaactagacagaatcattctcagaaactgctgcgtgatgtgtgcgttcaactctcagagtttaacttttcttttcattcagcgctttggaaacactctgtttgtaaagtctgcacgtggaaattttgaccacttagaggccttcggttggaaacgggtttttttcatgtaaggctagacagaagaattcccagtaacttccttgtgttgtgtgcattcaactcacagagttgaacgttcccttagacagagcagatttgaaacactctatttgtgcaatttgcaagtgtagatttcaagcgctttaaggtcaatggcagaaaaggaaatatcttcgtttcaaaactaggcagaatcattcccacaaactgcgttgtgatgtgtttgttcaactcacagagtttaacctttcttttcatagagcagttaggaaacagtctgtttgtaaattctgtaagtggatattctgacatcttgtggccttcgttggaaacgggattacttcatattctgctagacagaagaattctcagtaacttccttgtgttttgtgtattcaactcacagagttgaacgatcatttacacaaagcagacttgaaacacactttttgtggaatttgcaagtggagatttaagccgctttgaggtcaatggtagaataggaaatatcttcctatagaaactagacagaatgattctcagaaactcctttgtgatgtgtgcgttcaactcacagagttcaacctttcttttcatagagcagttgggaaacactctgtttgtaaagtctgcaagtggatattcagacttctttgaggtcttcgttggaagcgggatttcttcatattctgctagacagaagaattctcagtaacttccttgtgttgtgtgtattcaactgacagagttgaactttcatttagagagagtagatttgaaacactgtttttgtggaatttgcaagtggagatttcaagcgctttggggccaaaggcagaaaaggaaatatcttcatataaaaactagacagaatcattctcagaaaactgctgcgtgatgtgtgcgttcaactctcagagtttaacttttcttttcattcagcggtttggaaacactctgtttgtaaagtctgcacgtggaaattttgaccacttagaggccttcgttggaaacgggtttttttcatgtaaggctagacagaagatttcccagtaaattccttgtgttgtgtacattcaactcacagagttgaacgttcccttagacagagcagatttgaaacactctttttgtgcaattggcaagtggagatttcaagcgctttaaggtcaatggcagaaaaggaaatatcttcgtttcaaaactagacagaatcattcccacaaactgcgttgtgatgttttcgttcaactcacagagtttaacctttccgttcatagagcagttaggaaacacactgtttgtaaagtctgtaagtggatattctgacatcttgtggccttcgttggaaacgggatttctttatattctgctagacagaagaattctcagaaacttccttgtgttgtgtgttttcaactcacagtgttgaacgatcctttacacagagcagacttgaaacactctttttgtgggatttgcaagtggagatttcagccgctttgaggtctatggtagaaaaggaaatatcttcgtataaaaactagacagaatgattctcagaaactcctttgtaatgtgtgcgttcaactcacagagtttaacgtttcttttcatagagcagttaggaaacactctgtttgtaaagtctgcaagtggatattcagacctctttgaggccttcgttggaaacgggtttttttcatataaggctagacagaagaattctcagtaacttccttgtgttgtgtgtattcagctgacagagttgaactttcatttagagagagcagatttgaaacactgtttttgtgtaatttgcaattggagatttcaagcgctttggggccaaaggcagaaaaggaaatatcttcgtataaaaactagacagaatcattctcagaaactgctgcgtgatgtgtgcgttcaactctcagagtttaacctttcttttcattcagcggtttggaaacactctgtttgtaaagtctgcacgtggatattttgaccacttagaggccttcgttggaaacgggtttttttcatgtaaggctagacagaagaattcccagtaacttccttgtgttgtgtacattcaactcacagagttgaactgttcccttagacagagcagatttgaaacactctttttgtgcaattggcaaatggagatttcaagcgctttaaggtcaatggcagaaaaggaaatatcttcgtttcaaaactagacagaatcattctcagaaactgctctgcgatgtgtgcgttgaactctcagagtttaacttttcttttcattcagcagtttggaaacactctgtttgtgaagtctgcacgtggatattttgaccatttagaggccttcgttggaaacgggtttttttcctgtaaggctagacagaagaattcccagtaacttccttgtgttgtgtacattcaactcacagagttgaacgttcccttagacagagcagacttgtaacactctttttgtggaatttgcaagtggagatttcagccgctttcaagtcaaaggtagaaaaggaaatatcttcctataaaaactagacagaatgattctcagaaactcctttgagatgtgtgcgctcaactcacagagtttaacctttcgtttcatagagcagttaggaaacactctgtttgtaaagtctgcaagtggatattcagacctctttgaggccttcgttggaaacgggtttttttcaaataaggctagacagaagaattctcagtaacttccttgtgttgtgtgtattcaactgacagagttgaactttcatttagagagagcagatttgaaacactgtttttgtggaatttgcaaatggagatttcaagcgctttggggccaaaggcagaaaaggaaatatcttcgtataaaaactagacagaatcattctcagaaactgctctgcgatgtgtgcgttcaactctcagagtttaacttttcttttcattcagcagtttggaaacactctgtttgtaaagtctgcacgtggatattttgaccacttagaggccttcgttggaaacgggttattttcctgtaaggctagacagaagaattcccagtaacttccttgtgttgtgtgcattcaactcacagagttgaacgttcccttagacagagcagatttgaaacactctatttgtgcaatttgcaagtgtagatttcaggcgctttaaggtcaacggcagaaaaggaaatatcttcgtttcaaaactagacagaatgattctcagaaactcctgtgtgaagtgtgtgttcaactcacagagtttaacctttctattcatagagtagttaggaaacactctgtttgtaaagtctgcaagtggatattttgacctctttgaggccttcgttggaaacgggtttttttcatgtaaggctagacagaagaattctcagtaactttccttgtgttgtgtgtattcaactcacagagttgaacgatcctttacacagagcagacttgtaacactctttttgtggaatttgcaaggggagatttcagccgctttgaagtcaaaggtagaaaaggaaatatcttcctataaaaactagacagaatgattctcacaaactcctttgtgatgtgtgcgttcaactcacagagtttaacctttcttttcatagagcagttaggaaacactctgtttgtaaagtctgcaagtggatattcagacctccttgaggccttcgttggaaacgggatttcttcatattctgctagacagaagaattcccagtaacttccttgtgttgtgtgtgttcaactcacagagttgaactttgatttacacagagcagatttgaaacactctttttgtggaatttgcaagtagagatttcaagcgctttgaggccaaaggcagaaaaggaaatatcttcgtataaaaactagacagaatcattctcagaaactgctctgcgatgtgtgcgttcaactctcagagtttaacttttcttttcattcagcagtttggaaacactctgtttgtaaagtctgcacgtggatattttgaccacttagaggccttcgttggaaacgggtttttttcctgtaaggctagatagaagaattcccagtaacttccttgtgttgtgtacattcaactcacagagttgaacgttcccttagacagagcagatttgaaacactctttttgtgcaattagcaagtggagatttcaagcgctttaaggtcaatggcagaaaaggaaatatcttactttcaaaactagacagaatgattctcagaaactcctttgtgatgtgtgcgttcaactcaaagagtttaacttttcttttcacagagcagttaggaaacactctgtttgtaaagtctgcaagtggatattcagacctatttgaggccttcgttggaaacgggatttcttcatattatgctagacagaagaattctcagtaacttccttgtgttgtgtgtattcaaatcacagagttgaacgatcctttacacagagcagacttgaaacattctttttgtggaatttgcaagtggagatttcagccgctttgaggtcaatggtagaataggaaatatcttcctatagaaactagacagaatgattctcagaaactcctttgtgatgtgtgcgttcaactcacagagtttaacctttcttttcatagagcagttaggaaacaatctgtttgtaaagtctgcaagtggatattcagacctctttgaggccttcgttggaaacgggtttttttcatataaggctagacagaagaattcccagtaacttccttgtgttgtgtgtgttcaactcacagagttgaactttcatttacacagagcagatttgaaacactctttttgtggaatttgcaagtggggatttcaagcgctttgaggccaaaggcagaaaaggaaatatcttcgtataaaaactagacagaatcattctcagaaaccgctctgtgatgtgtgcgttcaactctcagagtttaacttttcttttcatttagcagtttggaaactctcgggttgtaaagtctgcacgtggatattttgaacacttagaggccttcgttggaaacgggtttttttcatgtaaggctagacagaaaaattcccagtaacttccttgtgttgtgtgcattcaactcacagagatgaacgttcccttcgacagagcagatttgaaacactctatttgtgcaatttgccagtgtagatttcaagcgctttaaggtcaatggcagaaaaggaaatatcttcgtttcaaaactagacagaacgattctcagaaactcctttgtgatgtgtgcgttcaactcacagagtttaacctttcttttcatagaacagttaggaaacactctgtttgtaaagtctgcaagtggatattcagacctctatgaggccttcgttggaaacgggatttcttcatattctgctagacagaagaattctcagtaacttccttgtgttgtgtgtattcaactcacagagttgaacgatcctttacacagagcagacttgaaacactctttttgtggaatttgcaagtggaggtttcagccgctttgaggtcaatagtagaaaaggaaatatcttcgtagaaaaactagacagaatgattctcagaaactcctttgggatgtgtgcgttcaactcacagagtttaacctttctgttcatagagcagttaggaaacactctgtttgtaaagtctgcaagtggatattcagacctccttgaggccttcggtggaaacgggatttcttcatattctgctagacagaagaattcccagtaacttccttgtgttgtgtgtgttcaactcacagagttgaactttcatttacacagagcagatttgaaacactctttttgtggaatatgcaagtggagatttcaagcgctttgaggccaaaggcagaaaaggaaatatcttcgtttcaaaactagacagaatcattctcagaaactgctctgcgatgtgtgcgttcaactctcagagtttaacttttcttttcattcagcagtttggaaacactctgtttgtaaagtctgcacgtggataatttgaccacttagaggccttcgttggaaacggtttttttcatgtaaggctagacagaagaattctcagtaacttccttgtgttgtgtgtattcaactcacagagttgaacgatcctttacacagagcagacttgtaacactctttttgtggaatttacaagtggagatttcagccgctttgaagtcaaaggtagaaaaggaaatatcttcctataaaaactagacagaatcattcccacaaactgcgttgtgatgtgttcgttcaactcacagagtttaacctttcttttcatagagcagttaggaaacagtctgtttgtcaattctgtaagtggatattctgacatcttgtggccttcgttggaaacaggatttcttcatattctgctagacagaaagaattctcagtaacttccttgtgttgtgtgtattcaactcacagagttgaacgatcctttacacagagcagacttgaaacactctttttgtggaatttgcaagtggagatttcagccgctttgaggtcaatagtagaaaaggaaatatcttcgtagaaaaactagacagatgattctcagaaactcctttgtgatgtgtgcgttcaactcacagagtttaacctttcttttcatagagcagttaggaaacactctgtttgtaaactctgcaagtggatattcagacctctttgaggccttcgttggaaacgggttttcttcatattatgcctgacagaagaattcccagtaacttccttgtgttgtgtgtgttcaactcacagagttgaactctcatttacacagagcagatttgaaacactctttttgtggaatttgcaagtggagatttcaagcgctttgaggccaaagacagaaaaggaaatatcttcgtataaaaactagacagaatcattctcagaaactgctctgcgatgtgtgcgttcaactctcagagtttaacttttcttttcattcagcagtttggaaacactctgtttgtaaagtctgcacgtggatattttgaccacttagaggccttcgttggaaacgggtttttttcctgtaaggctagtcagaagatttcccagtaacttccttgtgttgtgtacattcaactcacagagttgaacgttcccttagacagagcagatttgaaacactctttttgtgcaattggcaaatggagatttcaagcgctttaaggtcaatggcagaaaaggaaatatcttcgtttcaaaactagacagattcattcccacaaactgcgttgtgatgtgttcgttcaactcacagagtttaacctttctgttcatagagcagttaggaaacactctgtttgtaaagtctgccagtggatattcagacctccttgaggccttcgttggaaacgggatttcttcatattctgctagaaagaagaattctcagtaacttccttgtgttgtgtgtattcaactcacagaattgaacgatcctttacacagagcagacttgaaacattctttttgtggtatttgcaagtggagatttcagccgctttgaggtcaatggtagaataggaaatatcttcctatagaaactagacagaatgattctcagaaactcctttgtgatgtgtgcgttcaactcacagagtttaacctttcttttcatagagcagttaggaaacactctgtttgtaaactctgcaagtggatattcagacctctttgaggccttcgttggaaacgggatttcttcatactgtgctagacagaagaattctcagtaacttccttgtgttgtgtgtattcaactcacagagttgaacgatcctttacacagagcagacttgaaacactcttcttgtggaatttgcaagtggagatttcagccgcgttgaggtcaatggtagaaaaggaaatatcttcgtataaaaactagacagaatcattctcagaaactgctctgtgatgtgtgcgttcaactctcagagtttaacttttcttttcattcagcagtttggaaacactctgtttgtaaagtctgcacgtggatattttgaccacttagaggccttcgttggaaacgggttttttcatgtaaggctagacagaagaattcccagtaacttccttgtgttgtgtacattcaactcacagagttgaacgttcccttagacagagcagatttgaaacactctttttgtgcaattggaaagtggagatttcaagcgctttaaggtcaatggcagaaaaggaaatatctccgtttcaaaactagacagaatcattcccacaagctgcgttgtgatgtgttcgttcatctcacagagtttaacgtttcttttcatagagcagttaggaaacagtctgtttgcaaattctataagtggatattctgacatcttgtggccttcgttggaaacgggatttcttcatattctgctagacagaagaattctcagtaacttccttgtgttgtgtgtattcaactcacacagttgaacgatcctttacacagagcagacttgaaacactctttttgtggaatttgcaagtggagatttcagccgctttgaggtcaacagtagaaaaggaaatatcttcgtagaaaaactagacagaatgattctcagaaactcctttgtgatgtgtgcgttcaactcacagagtttaacctttcttttcatagatcagttaggaaacactctgtttgtaaagtctgcaagtgaatattcagacatccttgaggctttcgttggaaacgggatttcttcatattctgctagaaagaagaattcccagtaacttccttgtgttgtgtgtgttcaactcacagagttgaactttcatttacacagagcagatttgaaacagtctttttgtggaatttgcaaatggagatttcaagcgctttgaggtcaaaggcagaaaaggaaatatcttcgtataaaaactagacagaatcattctcagaaactgctgcgtgatgtgtgcgttcaactctcagagtttaacttttcttttcattcagcggtttggaaacactctgtttgtaaagtctgcacgtggatattttgtccacttagaggccttcgttggaaacgggtttttttcatgtaattctagacagaagaattcccagtaacttccttgtgttgtgtgcattcaactcacagagttgaacgttcccttagacagagcagatttgaaacactctatttgtgcaatttgcaagtgtagttttcaagctctttaaggtcaacggcagaaaaggaaatatcttcgtttcaaaactagacagaatcattcccacaaactgcgttgtgatgtgttcgttcaactcacagagtttaacctttctgttcatagagcagttaggaaacactctgtttgtaaagtctgcaagtggatattcagacctctttgtggccttcgttggaaacgggatttcttcatattatgctagacagaagaattctcagtaacttccttgtgttgtgtgtattcaactcacagagttgaacgatcctttacacagagcagacttgtaacactctttttgtggaatttgcaagtggagatttcagccgctttgaagtcaaaggtagaaaaggaaatatcttcctataaaactagacagaatgattctcagaaactcctttgtgatgtgtgcgttcaactcacacagtttaaccttccttttcatagagcagttaggaaacactctgtttgtaaagtctgcaagtggatattcagacctctttgaggccttcgttggaaacgggtttttttcatataaggctagacagaagaattctccgtaacttccttgtgttgtgtgtattcaactgacagagttgaactttcatttagagagatcagatttgaaacactctatttgtgcaatttgcaagtgtagatttcaagcgcattaaggtcaatggcagaaaaggaaatatcttcgattcaaaactagacagaatcattctcagaaactgctctgcgatgtgtgcgttcaactctcagggtttaacttttcttttcattcagcagtttggaaacactctgtttgtaaagtctgcacgtggatattttgaccacttagaggccttcgttggaaacgggttttcttcctgtaaggctagacagaagaattctcagtaacttccttgtgttgtgtacattcaactcacaagagttgaacgttcccttagacagagcagatttgaaacactctttttgtgcaattggcaagtggtgatttcagccgctttgaggtcaatggtagaaaaggaaatatcttcgtataaaaactagacagaatcattcccagaaactgcgttgtgatgtgttcgttcaactcacagagtttaacctttcttttcatagagcagttaggaaacagtctgtttgtcaattctgtaagtggatattctgacatcttgtggcgttcgttggaaacgggatttcttcatattctgctagacagaagaattctcagtaacttccttgtgttgtgtgtattcaactcacagagttgaacgatcctttacacagagcagacttgaaacactctttttttggaatttgcaagtggagatttcagccgctttgaggtcaatggtagaaaaggaaactatcttcatataaagactagacagaatgattctcagaaacttctttgtgatgtgtgcgttcaactcacagagtttaacctttcttttcatagagcagttaggaaacactctgtttgtaaagtctgcaagtggatattcagacctctttgaggccttcgttggaaacgggatttcttcatactatgctagacagaagaattctcagtaacttccttgtgttgtgtgtattcaactcgcagagttgaacgatcctttacacagagcagacttgtaacactctttttgtggaatttgcaagtggagatttcagccgctttgaagtcaaaggtagaaaaggaaatatcttcctataaaaactagacagaaatcattctcagaaactgctgcgtgatgtgtgcgttcaactctcagagtttaacttttcttttcattcagcggtttggaaacactctgtttgtaaagtctgcacgtggatattttgaccacttagaggccttccttggaaacgggtttttttcatgtaaggctagacagaagaattcccagtaacttccttgtgttgtgtgcattcaactcacagagttgaacgttcccttagacagagcagatttgaaacactctatttgtgcaatttgcaagtgtagatttcaagcgctttaaggtcaacggcagaaaaggaaatatcttcgtttcaaaactagacagaatgattctcagaaactcctttgtgatctgtgcgttcaactcacagagtttaacttttcttttcatagagcagttaggaaacactctgtttgtaaagtctgcaagtggatattcagagctctttgaggccttcgttggaaacgggatttcttcatattctgctagacagaagaattctcagtagcttccttgtgttgtgtgtattcaactcacagagttgaacgatcctttacagagagcagacttgaaacactctttttgtggaatttgcaagtggagatttcagccgctttgaggtcaatggtagaataggaaatatcttcctatagaaactggacagaatgattctcagaaactcctttgtgatgtgggcgttcaactcacagagtttaacctttcttttcatagagcagttaggaaacactctgtttgtaaagtctgcacgtggatatttggacttctttgaggccttcgttggaaacggttttttttcatgtaaggctagacagaagaattctcagtaactttccttgtgttgtgtgtattcaactgacagagttgaactttcatttagagagagctgatttgaaacactgtttttgtggaatttgcaagtggagatttcaagcgctttggggccaaaggcagaaaaggaaatatctttgtataaaaactagacagaagcattctcagaaactgctctgcgatgtgtgcgttcaactctcagagtttaacttttcttttcattcagcagtttggaaacactctgtttgtaaagtctgcacgtggataatttgaccacttagaggccttcgttggaaacgggtttttttcatgtaaggctagacagaagaattcccagtaacttccttgtgttgtgtacattcaactcacagagttgaacgttcccttagacagagcagatttgaaacactctttttgtgcaattggcaagtggagatttcaagcgctttaaggtcaatggcagaaaaggaaatatcttcgtttcaaaactagacagaatcattcccacaaactgcgttgtgatgtgttcgttcaactcacagagtttaacctttcttttcatagagcagttaggaaacagtctgtttgtcaattctgtaagtggatattcagacctctttgaggccttcgttggaaacgggatttcttcatactatgctagacagaggaattctcaggaacttccttgtgttgtgtgtattcaactcacagagttgaacgatcctttacacagagcagacttgaaacactcttttggtggaatttgcaagtggagatttcagccgctttgagttcaatggtagaataggaaatatcttcctatagaaactacacagaatgattctcagaaactgctttgtgatgtgtgcgttcaactcacagagttcaacctttcttttcatagagcagttgggaaacactctgtttgtaaagtctgcaagtggatattcagacttctttgaggccttcgttggaagcgggatttcttcatgttctgctagacagaagaattcccagtaacttccttgtgttgtgtgtgttcaactcacagagttgaactttcatttacacagagcagatttgaaacactctttttgtggaatttgcaggtggagatttcaagcgctttgaggccaaaggccgaaaaggaaatatcttcgtataaaaactagacagaatcattctcagaaactgctctgcgatgtgtgcgttcaactctcagagtttaactttgcttttcattcagcagtttggaaacactctgtttgtaaagtctgcacgtggataatttgaccacttagaggccttcgttggaaacgagtttttttcatgtaaggttagacagaagaattctcagtaacttccttgtgttgtgtacattcaactcacaagagttgaacgttcccttagacagagcagatttgaaacactctttttgtgcaattggcaagtggtgatttcagccgctttgaggtcaatggtagaaaaggaaatatcttcgtataaaaactagacagaatgattctcagaaactcctttgtgatgtgtgcgttcaactcacagagttcaacctttcttttcatagagcagttgggaaacattctgtttgtaaagtctgcaagtggatattcagacttctttgaggccttcgttggaagcgggatttcttcatattctgctagacagaagaattctcagaaacttccttgtgttgtgtgttttcaactcacagagttgaacgatcctttacacagagcagacttgaaacactccttttgtggaatttgcaagtggagatttcagccgctttgaggtcaatggtagaataggaaatatcttcctatagaaactagacagaatgattctcagaaactcctttgtgatgcgtgcgttcaactcacagagtttaacttttcttttcatagagcagttaggaaacactctgtttgtaaaggctgcaagtggatattcagacccctttgaggccttcgttggaaacgggatttcttcatattatgcgagacagaagaattctcagtaacttccttgtgttgtgtgtattcaactcacagagttaaacgatcctttacacagagcagacttgaaacactctttttgtggaatttgcaagtggagatttcagccgctttgaggtcaatagtagaaaaggaaatatcttcgaagaaaaactagacagaatcattctcagaaactgctctgcgatgtgtgcgttcaactctcagagtttaacttttcttttcattcagcagtttggaaacactctgtttgtaaagtctgcacgtggatattttgaccacttagaggccttcgttggaaacgggtttctttcctgtaaggctagacagaagaattcccagtaacttccttgtgttgtgcgcattcaactcacagagttgaacgttcccttagacagagcagatttgaaacagcctatttgtgcaatttgcaagtgtacatttcaagcactttaaggtcaacggcagaaaaggaaatatcttcgtttcaaaactagacagaatgattctcagaaactcctttgtgatgtgtgcgttcaactcacagagtttaacctttcttttcacagagcagttaggaaacactctgtttgtaaagtctgcaagtagatattcagacctctttgaggccttcgttggaaaagggatttcttcatattatgctagacagaagaattctcagaaacttccttgtgttgtatgtattcaactcacagagttgaacgatcctttacacacagcagacttgaaacactctttttgtggaatttgcaagtggagatttcagccgctttgtgttcaatggtagaaaaggaaatatcttcgtataaaaactagacagaatgattctcagaaactcctttgtgatgtgtgcgttcaactcacagagtttaacctttcttttcatagagcagttgggaaacactctgtttgtaatgtctgcaagtggatattcagacatccttgaggctttcgttggaaacgggatttcttcatattctgctagaaagaagaattctcagtaacttccttgtgttgtgtgtattcaactgacagagttgaactttcatttagagagagcagatttgaaacactgtttttgtggaatttgcaagtggagatttcaagcgctttggggccaaaggccgaaaaggaaatatcttcgtataaaaactagacagaatcattctcagaaactgctgcgtgatgtgtgcgttcaactctcagagtttaacttttcttttcattcagcggtttggaaacactctgtttgtaaagtctgcacgtggatattttgaccacttagaggccttcgttggaaacgggtttttttcatgtaaggctagacagaagaattcccagtaacttccttgtgttgtgtacattcaactcacagagttgaacgttcccttagacagagcagatttgaaacactctttttgtgcaattggcaagtggagatttcaagcgctttaaggtcaatggcagaaaaggaaatatcttcgtttcaaaactagagagaatgattctcatgaactcctttgtgatgtgtgcgttcaactcacagagtttaacctttgttttcatagagcagttaggaaacactctgtttgtaaagtctgcaagtggatattcagacctccttgaggccttctttggaaaagggatttcttcatattctgctagacagaagaattctcagtaacttccttgtgttgtgtgtattcaactcacagagttgaatgatcctttacacagagcagacttgaaacactctttttgtggaaattgcaagtggagatttcagccgctttgaggtcaatggtagaaaagtaaatatcttcgtataaagactagacagaatgattctcagaaactcctttgtgatgtgtgcgttcaactcacagaatttaacatttcttttcatagagcagttaggaaacactctgtttgtaaagtctgtaagtggatattcagacctctttgaggccttcgttggaaacgggatttcttcgtattctgctggacagaagaattctcagtaacttcccttgtgttgtgtgtattcaactgacagagttgaactttcatttagagagagcagatttgaaacactgtttttgtggaatttgcaagtggagatttcaagcgcttcggggccaaaggcagaaaaggaaatatcttcgtataaaaactagacagaatcattctcagaaactgctgcgtgatgtgtgcgttcaactctcagagtttaacttttcttttcattcagcggtttggaaacactctgtttgtaaagtctgcacgtggatattttgaccacttagaggccttctttggaaacgggtttttttcatataaggctagacagaagatttcccattaaattccttgtgttgtgtacattcaactcacagagttgaacgttcccttagacagagcagatttgaaacactctttttgtgcaattggcaagtggagatttcaagcgctttaaggtcaatggcagaaaaggaaatatcttcgtttcaaaactagacagaatcattcccacaaactgcgttgtgatgtgttcgttcaactcacagagtttaacctttccgttcatagagcggttaggaaacactctgtttgtaaagtctgtaagtggatattctgacatcttctggccttcgttggaaacgggatttcttcatattctgctagacagaagaattctcaagtaacttccttgtgttgtgtgtattcaactcacagagttgaacgatcctttacacagagcagacttgtaacactctttttgtggaatttgcaagtggagatttcagccgctttgaagtcaaaggtagaaaaggaaatatcttcctataaaaactagacagaatgatcctcagaaactcccttgtgatgtgtgcgttcaactcacagactttaaactttcttttcatagagcagttaggaaacactctgtttgtaaagtctgcaagtggatattcagacctccttgaggccttcgttggaaacgggatttcttcatattatgctagacagaagaattctcagtaacttccttgtgttgtgtgtattcaactgacagagttgaactttcatttagagagagcagatttgaaacactgtttttgtggaatttgcaagtggagatttcaagcgctttggggccaaaggcagaaaaggaaatatcttcgtatgaaaactaggcagaatcattctcagaagctgctgcgtgatgtgtgcgttcaactctcagagtttaacttttcttttcattcagcggtttggaaacactctgtttgtgaagtctgcacgtggatattttgaccacttagaggccttcgttggaaacgggttttttgcatgtaaggctagacagaagaattcccagtaacttccttgtgttgtgtgcattcaactcacagagttgaacgttcccttagacagagcagatttgaaacactctatttgtgcaatttgcaagtgtagatttcaagcgctttaaggtcaatggcagaaaaggaaatatcttcgtttgaaaaatagacagaatcattcccacaaactgcgttgtgatgtgttcgttcaactcacagagtttaacttttcttttcatagagcagttaggaaacactctgtttgtaaagtctgtaagtggatattcagacctctttgaggccttcgttggaaacgggatttattcatattctgctagacagaagaattctcagtaactgccttgtgttgtgtgtattcaactcacagagttgaacgatcctttacacagagcagacttgaaacactctttttgtggaatttgcaaggggagatttcagccgctttgaggtcaatggtagaataggaaatatcttcctatagaaactagacagaatgattctcagaaactcctttgtgatgtgtgcgttcaactcacagagtttaacctttcttttcatagagcagttaggaaacactctgtttgtaaagtctgcaagtggatattcagacctctttgaggccttcgttggaaacgggatttcttcatataaaatctagacagaagaattcccagtaacttccttgtgttgtgtgtgttcaactcacagagttgaactttcatttacacagagcagatttgaaacactctttttgtggaattcgcaagtggagatttcaagcgctttgaggccaaaggcagaaaaggaaatatcttcgtttcaaaactagacagaatcattctcagaaactgctgcgtgatgtgtgcgttcaactctcagagtttaacttttcttttcattcagcggttttgaaacactctgtttgtaaagtctgcacgtggatattttgaccacttagaggccttcgttggaaacgggtttttttcatgtaaggctagacagaagaattcccagtaacttccttgtgttgtgtgcattcaactcacagagttgaacgtttccttagacagagcagatttgaaacaatctatttgtgcaatttgcaagtgtagatttcaagcgctttaaggtcaatggcagaaaaggaaatatcttcgtttcaaaactagacagaatcattcccacaaactgcgttgtgatgtgtgcgttcaactcaaagagtttaacctttcttttcatagagcagttaggaaacactctgattgtaaagtctgcaagtggatattcagacctccttgaggccttcgttggaaacgggatttcttcatattctgctagacagaagaattctcagtaactatcttgtgttgtgtgtattcaactcacagagttcaacgatcctttacacagagcagacttgaaacactctttttgtggaatttgcaagtggagatttcagccgctttgaggtcaatggtagaataggaaatatcttcccatagaaactagacagaatgattctcagaaactcctttgtgatgtgtgcgttcaactcacagagttcaacctttgttttcctagagcagttgggaaacactctgtttgtaaagtctgcaagtggatattcagacttctttgaggccttcgttggaagcgggatttcttcatgttctgctggacagaagaattcccactaacttccttgtgttgtgtgtgttcaactcacagagttgaactttcatttacacagagcagatttgaaacactctttttgtggaatttgcaagtggagatttcaagcgctgtgaggccaaaggcagaaaaggaaatatcttcgtataaaaactagacagaatcattctcagaaactgctctgcgatgtgtgcgttcaactctcagagtttaacttttcttttcattcagcagtttggaaacactctgtttgtaaagtctgcacgtggatattttgaccacttagaggccttcgttggaaacgggtttttttcctgtaaggcatagacagtagaattcccagtaacttccttgtgttgtgtacattcaactcacagagttgaacgttcccttagacagagcagatttgaaacactctttgtgcaattggcaagtggagatttcaagcgctttaaggtcaatggcagaaaaggaaatatcttcgtttcaaaactagacagaatcattcccacaaactgcgttgtgatgtgttcgttcaactcacagcagtttaacctttctgttcatagagcagttaggaaacactctgtttgtaaagtctgtaagtggatattctgacatcttgtggccttcgttggaaacgggatttcttcattttctgctagacagaagaattctcagtaactgccttgtgttgtgtgtattcaactcacagagttgaacgatcctttacacagagcagacttgaaacaatctttttgtggaatttgcaagtggagatttcagccactttgaggtcaatggtagaataggaaatatcttcctatagaaactagacagaatgattctcagaaactcctttgtgatgtgtgtgttcaactcacagagtttaacctttcttttcatagagcagttagtaaacactccgtttataaagtctgcaagtggatattcagacccctttgaggccttcgttggaaacgggatttcttcatattatgctagacagaagaattcccagtaacttccttgtgttgtgtgtgttcaactcacagagttgaactttcatttacacagagcagatttgaaacactctttttgtggaatttgcaggtggagatttcaagcgctttgaggccaaaggcagaaaaggaaatatcttcgtataaaaactagacagaaatcattctcagaaactgctctgcgatgtgtgcgttcaactctcagagtttaacttttcttttcattcagcagtttggaaacactctgtttgtaaagtctgcacgtggataatttgaccacttagaggccttcgttggaaacgggtttttttcatgtaaggctagacagaagaattcccagtaacttccttgtgttgtgtacattcaactcacagagttgaacgttcccttagacagagcagatttgaaacactctttttgtgcaattggcaagtggagatttcaagcgctttaaggtcaatggcagaaaaggaaatatcttcgtttcaaaactagacagaatgattctgagaaactcctttgtgatatgtgcgttcaactcacagagtttaacctttcttttcatagagcagttaggaaacactctgattgtaaagtctgcaagtggatattcagacctccttgaggccttcgttggaaacgggatttcttcctattatgctagacagaagaattctcagtaacttccttgtgttgtgtgtattcaactcacagagttgaatgatcctttacacagagcagacttgaaacactctttttgtggaatttgcaagtggagatttcagccgctttgagttcaatggtagaataggaaatatcttcctatagaaactagacagaatgattctcagaaactcctttgtgatgtgtgcgttcaactcacagagtttaacctttcttttcatagagcagttaggaaacactctgtgtgtaaagtttgcaagtggatattcagacctctttgaggccttcgttggaaacgggtttttttcatataaggttagacagaagaattctcagtaacttccttgtgttgtgtgtattcaactcacagagttgaatgatcctttacacagaacagacttgaaacactctttttgtggaatttgcaagtgcagatttcagccgctttgaggtcaagggtagaaaaggaaatatcttcgtacaaaaactagacagaatcattctcagaaactgctgcgtgatgtgtgcgttcaactctcagagtttaacttttcttttcattcagcggtttggaaacactctgtttgtaaagtctgcacgtggaaattttgaccacttagaggccttcgttggaaacgggtttttttcatgtaaggctagacagaagaattcccagtaacttccttgtgttgtgtgcattcaactcacagagttgaacgttcccttagacagagaagatttgaaacactctatttgtgcaatttgcaagtgtagatttcaagcgctttaaggtcaacggcagaaaaggaaatatcttcgtttcaaaactagacagaatcattaccacaaactgcgttgtgatgtgttcgttcaactcacagagtttaacctttctcttcatagagcagttaggaaacactctgtttgtaaagtctgcaagtggatattcagacctccttgaggccttcgttggaaacgggatttcttcatattatgctagacagaagaattcctcagtaacttccttgtgttgtgtgtattcaactcacagagttgaatgatcctttacacagagcagacttgaaacactctttttgtggaatttgcaagtggagatttcagccgctttgaggtcaatggtagaataggaaataacttcctatagaaactagacagaatgattctcagaaactcctttgtgatgtgtgtgttcaactcacagagttcaacctttcttttcatagagcagttgggaaacactctgtttgtaaagtctgcaagtggatattcagacctccttgaggccttcgttggaaacgggatttcttcatattatgctagacagaagaattctcagtaacttccttgtgttgtgtgtattcaactgacagagttgaactttcatttggagagagcagatttgaaacactgtttttgtggaatttgcaagtggagatttcaagcgctttggggccaaaggcagaaaaggaaatatcttcgtataaaaactagacagaatcattctcagaaaatcctctgtgatgtgtgctttcaactctcagagtttaacttttcttttcattcagcagtttggaaacactctgtttgtaaagtctgcacgtggatattttgaccacttagaggccttcgttggaaacgggtttttttcatgtaagggtagacagaagaattcccagtaacttccttgtgttgtgggcattcaactcacagagttgaacgttcccttagacagagcagatttgaaacactctatttgtgtaatttgcaagtgtagatttcaagcgctttaaggtcaacggcagaaaaggaaatatcttcgtttcaaaactagacagaatcattcccacaaacggcgttgtgatgtgttcgttcaactcacagagtttaacctttctgttcatagagcagttaggaaacactctgtttgtaaagtctgtaagtggatattctgacatcttgtggccttcgttggaaacgggatttcttcatattctgctagacagaagaattcccagtaacttccttgtgttgtgtacattcaactcacagagttgaacgttcccttagacagagcagacttgtaacactctttttgtggaatttgcaagtggagatttcagccgctttgaagtcaaaggtagaaaaggaaatatcttcctataaaaactagacagaatgattctcagaaactcctttgtgatgtgtgcgttcaactcacagagtttaacttttcttttcatagagccgttaggaaacactctgtttgtaaagtctgcaagtggatattcagacctctttgaggccttcgttggaaacgggatttcttcattttatgctagacagaagaattctcagtaacttccttgtgttgtgtgtattcagctgacagagttgaactttcatttagagagagcagatttgaaacactgtttttgtgtaatttgcaattggagatttcaagcgctttggggccaaacccagaaaaggaaatatcttcgtataaaaactagacagaatcattctcagaaactgctctgcgatgtgtgctttcaactctcagagtttaacttttcttttcattcagcagtttggaaacactctgtttgtaacgtctgcacgtggatattttgaccacttagaggccttcgttggaaacgggtttttttcctgtaaggctagacagaagaattcccagtaacttccttgtgttgtgtacattcaactcacagagttgaacgttcccttagacagagcagatttgaaacactctttttgtgcaattggcaagtggagaattcaagcgctttaaggtcaatggcagaaaaggaaatatcttcgtttcaaaactagacagaatgattctcagaaactcctttgtgatgtgtgcgttcaactcacagagtttaacctttcttttcatagagcagttaggaaacactctgtttgtaaagtctgcaagtggatattcagacctccttgaggccttcgttggaaacgggatttcctcatattatgctagacagaagaattcccagtaacttccttgtgttgtgtgtattcaactcacagagttgaacgatcctttacacagagcagacttgaaacactctttttgtggaatctgcaagtggagatttcagccgctttgaggtcaatggtagaataggaaatatcttcctatagaaactagatagaatgattctcagaaactcctttgtgatatgtgtgttcaactcacagattttaacctttcttttcatagagcagttagtaaacactctgtttataaagtctgcaagtggatattcagacccctttgaggccttcgttggaaacgggatttcttcatattctgctagacagaagaattctcagtaactttccttgtgttgtgtgtattcaactgacagagttgaactttcatttagagagagcagatttgaaacactgtttttgtggaatttgccagtggagatttcaagcgcattggggccaaaggcagaaaaggaaatatcttcgtataaaaactagacagaatcattctcagaaactgctctgcgatgtgtgcattcaactctcagagtttaatttttcttttcattcagcagtttggaaacactctctttgtaaagtctgcacgtggatattttgaccacttagaggccttcgttggaaacgggttttattcctgtaaggctagacagaagaattcccagtaacttccttgtgttgtgtacattcaactcacagagttgaacgttcccttagacagagcagatttgaaacactctttttgtgcaattggcaagtggagatttcaagcgctttaaggtcaatggcagaaaaggaaatatcttcgtttcaaaaccagacagaatcattcccaaaaactgcgttgtgatgtgtgcgttcaactaacagagtttaacctttcttttcatagagcagttaggaaacactctgtttgtaaactctgcaagtggatattcagacctctttgaggccttcgttggaaacgggatttcttcatactgtgctagacagaagaattctcagtaacttccttgtgttgtgtgtattcaactcacagagttgaacgatcctttacacagagcagacttgtaacactctttttgtggaatttgcaagtggagatttcagccgctttgaagtcaaaggtagaaaaggaaataacttcctataaaaactagacagaatgattctcagaaactcctttgtgatgtgtgcgttcaactcacagagtttaacctttcttttcatagagcagttaggaaacactctgtttgtaaagtctgcaagtggatattcagacctccttgaggctttcgttggaaacgggatttcttcatattatgctagaaagaagaattctcagtaacttccttgtgttgtgcgtattcaactgacagagttgaactttcatttagagagagcagatttgaaacactctttttgtggaatttgcaagtggagatttcaagcgctttggggccaaaggcagaaaaggaaatatcttcgtataaaaactagacagaatcattctcagaaactgctgcgtgatgtgtgcgttcaactctcagagtttaacctttcttttcattcagcggtttggaaacactctgtttctaaagtctgcacgtggatattttgaccacttagaggccttcgttggaaacgggtttttttcatgtaaggctagacagaagaattcccagtaacttccttgtgttgtgtgcattcaactcacagagttgaacgttcccttagacagagcagatttgaaacactctatttgtgcaatttgcaagtgtagatttcaagcgctttaaggtcaacggcagaaaaggaaatatcttcgtttcaaaactagacagaatgattctcagaaactcctttgtgatgtgtgccttcaagtcacagagtttaacctttcttttcatacagcagttaggaaacactctgtttgtaaagtctgcaagtggattttcagacctctttgtggccttcgttggaaacgggatttcttcatattctgctagacagaagaattctcagtaacttccttgtgttgtgtgtattcaactcacagagttgaacgatcccttacacagagcagacttgaaacactcttgttgtggaatttgcaagtggagatttcagccgctttgaggtcaatggtagaaaagggaatatcttcgtatagaaactagacagaatgattctcagaaacttctttgtgatgtgtgcgttcaactcacagagtttaacctttcttttcatagagcagttaggaaacactccgtttgtaaactctgcaagtggatattcagacctctttgaggccttcattggaaacgggatttctccatactatgctagacagaagaattctcagtaacttccttgtgttgtgtgtattcagctgacagagttgaactttcatttagagagagcagatttgaaacactgtttttgtgtaatttgcaattggagatttcaagtgctttggggccaaacgcagaaaaggaaatatcttcgtataaaaactagacagaatcattctcagaaactgctctgcgatgtgtgcgttcaactctcagagtttaacttttcttttcattcagcagtttggaaacactctgtttttaaagtctgcacgtggataatttgaccacttagaggccttcgttggaaacgggtttttttcatgtaaggctagacagaagaattcccagtaacttccttgggttgtgtacattcaactcacagagttgaacgtttccttagacagagcagatttgaaacactctttttgtgcaattggcaagtggtgatttcagccgctttgaggtcaatggtagaaaaggaaatatcttcgtataaaaactagacagaatgattctcagaaactcctttgtgatgtgtgcgttcaactcacagagtttaacttttcttttcatagagcagttaggaaacactctgtttgtaaagtctgcaagtggatattcagacctccttgaggccttcgttggaaatgggatttcttcatattctgctagacagaagaattctcactaacttccttgtgttgtgtgtattcaactcacagagtagaacgatcctttacacagagcagacttgaaacactctttttgtggaatttgcaagtggagatttcagccgctttgaggtcaatggtagaaaaggaaatatcttcgtataaagactagacagaatgattctcagaaactcctttgtgatgtgtgcgttcaactcacagagattaacttttcttttcatagagcagttaggaaacactctgtttgtaaagtctgcaagtggatattcagacctctttgtggccttcgttggaaacgggatttcttcatattatgctagacagaagaattctcagtaacttccttgtgttgtgtgtattcaactgacagagttgaactttcatttagagagagcagatttgaaacactgtttttgtggaatttgcaagtggagatttcaagcgctttggggtcaaaggcagaaaaggaaatatcttcgtataaaaactagacagaatcattctcagaaactgctctgcgatgtgtgcgttcaactctcagagtttaacttttcttttcattcagcagtttggaaacactctgtttgtaaagtctgcacgtggataatttgaccacatagaggccttcgttggaaacgggtttttttcatgtaaggctaaacagaagcattcccagtaacttccttgtgttgtgtgcattcaactcacagagatgaacgttcccttagacagagcagatttgaaacgctctatttgtgcaatttgcaagtgtagatttcaagcgctttaaggtcaatggcagaaaaggtaatatcttcgtttcaaaactagacagaatgattctcagaaacttctttgtgatgtgtgcgttcaactcacagagtttaacctttcttttcatagagcagttaggaaacactctgtttgtaaactctgcaagtggatattcagacctctttgaggccttcgttggaaacgggatttctccatactttgctagacagaagaattctcagtaacttccttgtgttgtgtgtattcaactcacagagttgaacgatcctttacacagagcggacttgaaacactcgttttgtggaatttgcaagtggagatttcagccgctttgaggtcaatggtagaaaaggaaatatcttcgtataaaaactagacagaatgattctcagaaactcctttgtgatgtgtgctgttcaactcacagagtttaacctttctgttcatagagcagttaggaaacactctgtttgtaaagtctgcaagtggatattcagacctccttgaggccttcgttggaaacgggatttcttcatattctgctagacagaagaattcccagtaacttccttgtgttgtgtgtgttcaactcacagagttgaactttcatttacacagagcagatttgaaacactctttttgtggcatttgcaagtggagatttcaagggctttgaggccaaaggcagaaaaggaaatatcttcgtttcaaaactagacagaatcattctcagaaactcctttgtgatgtgtgcgttcaactcacagagtttaacctttcttttcatagagcagttaggaaacactctgtttgtaaagtctgcaagtggatattcagacctccttgaggccttcgttggaaacgggatttcttcatattctgctagacagaagaattcccaggaacttccttgtgttgtgtacattcaactcacagagttgaacgttcccttagacagagcagatttgaaacactctttttgtgcaattggcaagtggtgatttcagccgctttgaggtcaatggtagaaaagggaatatcttcgtataaaaactagacagaatcaatcccacaaactgcgttgtgatgtgttcgttcaactcacagagtttaacctttttgttcatagagcagttaggaaacactctgtttgtaaagtctgtaagtggatattctgacattttgtggccttggttggaaatgggatttcttcatattctcctagacagaagaattctcagtaacttccttgtgttgtgtgtattcaactcacagagttgaaagatcctttacacagagcagacttgaaacactctttttgtggaatttgaaagtggagatttcagccgctttgaggtcaatggtagaaaaggaaatatcttcgtatagaaactagacagaatgattctcagaaactcctttgtgatgtgtgcgttcaactcacagagtttaacttttcttttcatagagcagttaggaaacactctgtttgtaaagtctgcaagtggatattgagacctctttgaggccttcgttggaaacgggatttcttcatattctgctagacagaagaattcccagtaacttccttgtgttgtgtgtgttcaactcacagagttgaactttcatttacacagagcagatttgaaacactctttttgtggaatttgcaagtggagatttcaagggctttgaggccaaaggcagaaaaggaaatatcttcgtttcaaaactagacagaatcattctcagaaactgctctgtgatgtgtgcgtacaactctcagagtttaacttttcttttcattcagcagtttggaaacactctgcaaagtctgcacgtagatattttgaccacttagaggccttcgttggaaacgggtttttttcatgtaaggctagacagaagaattcccagtaacttccttgtgttgtgtgcattcaactcacagagatgaacgttcccttagacagagcagatttgaaacactctatttgtgtaatttgcaagtgtagatttcaagcgctttaaggtcaatggcagaaaaggaaatatctccgtttcaaaactagacagaatgattctcagaaactcctttgtgatgtgtgtgttcaactcacagagtttaacatttcttttcatagagcagttaggaaacgctctgtttgtaaagtctgcaagtggatattcagacctcgttgagaccttcgttggaaacgggatttcttcatattctgctagacagaagaattctcagtaacttccttgtgttgtgtttattcaactcacagagttgaacgatcctttacacagagcagacttgaaacactctttttgtggaatttgcaagtggagatttcagccgctttgtggtcaatggtagaaaaggaaatatcttcgtataaagactagacagaatgattctcaaaactcctttgtgatgtgtgcgttcaactcacagagtttaacctttcttttcatagagcagttaggaaacactctgtttgtaaagtctgcaagtggatattcagacctctttgaggccttcgttggaaacgggatttcttcatattctgctagacagaagaattcccagtaacttccttgtgttgtgtgtgttcaactcacagagttgaactttcatatacacagagcagatttgaaacactctttttgtggaatttgcaagtggagatttcaagcgctttgaggccaaaggcagaaaaggaaatatcttcgtataaaaactagacagaatcattctcagaaactgctctgcgatgtgtgcgttcaactctcagagtttaacttttcttttcattcagcagtttgaaaacactctgtttgtaaagtctgcacgtggatattttgaccacttagaggccttcgttggaaacgggtttttttgcctgtaaggctagacagaagaattcccagtaacttccttgtgttgtgtgcattcaactcacagagttgaacgttcccttagacagagcagatttgaaacactctatttgtgcaatttgcaagtgtagatttcaagcgctttaaggtcaacggcagaaaaggaaatatcttcgtttcaaaactagacagaatgattctcagaaactcctttgtgatgtgtgcgttcaactcacagagtttaacctttctgttcatagagcagttaggaaacactctgtttgtaaagtctgtaagtggatattctgacatcttgtggccttcgttggaaacgggatttcttcatattctgctagacagaagaattctcagaatcttccttctgttgtgtgtattcaactcagagagttgaatgatcctttacacagagcacacttgaaacactctttttgtggaatttgcaagtggagatttcagccgctttgaggtccatggtagaaaaggaaatatcttcgtataaaaactagacagaatgattctgagaaactcctttgtgatgtgtgcgttcaactcacagagtttaacctttcttttcatagagcagtttggaaacactccgtttgtaaactctgcaagtggatattcagacctccttgaggccttccttggaaacgggatttcttcatattatgctagacagaagaattcccagtaacttccttgtgttgtgtgtgttgaactcacagagttgaactttcatttagacagagcagatttgaaacactctttttgtggaatttgcaaatggagaattcatgcactttgaggccaaaggcagaaaaggaaatatcttcgtataaaaactagacagaatcattctcagaaactgctctgcgatgtgtgcgtacaaatctcagagtttaacttttcttttcattcagcagtttggaaacactctgtttgtaaagtctgcacgtggataatttgacaacttagagaccttcgttggaaacgggtttttttcatgtaaggctagacagaagaattcccagtaacttccttgtgttgtgtacattcaactcacagagttgaacgttcccttagacagagcagatttgaaacactctttttgtgcaattggcaagtggagatttcaagcgctttgaggtcaatgacagaaaaggaaatatcttcgtttcaaaactagacagaaatcattcccacaaactgcgttgtgatgtgttcgttcatctcacagagtttaacctttcttttcatagagcagttaggaaacagtctgtttgaaaattctgtaagtggatattctgacatcttgtggccttcgttggaaacgggatttcttcatattctgctagacagagcaattctcagtaaacttccttgtgttgtgtgttttcaactcacagagttcaacgatcctttacacagagcagacttgaaacactctttttgtggaatttgcaagtggagatttcagccgctttgaggtcaatggtagaataggaaatatcttcctatagaaactagacagaatgattctcagaaactcctttgtgatgtgtgcgttcaactcacagagtttaacctttcttttcatagagcagttaggaaacactctgattgtaaagtctgcaagtggatattcagaactccttgaggccttcgttggaaacggagatttcttcatattatgctagacagaagaattctcagtaacttccttgtgttgtgtgtattcaactcacagagttgaacgatcctttacagagagcagacttgaaacactctttttgtggaatttgcaagtggagacttcagccgctttgaggtcaatggtagaaaaggaaactatctacgtataaagactagacagaatcattctcagaaactgctctgcgatgtgtgtgttcaactcacagagtttcacctttcttttcatagagcagataggaaacactctgtttgtaaagtctgcaagtcgatattcagacctctttgaggccttcgttggaaacgggtttttttcatataaggctagacagaagaattcccagtaacttccttgtgttgtgtgcattcaactcacagagttgaacgttcccttagacagagcagatttgaaacactctatttgtgcaatttgcaagtgtagatttcaagcgctttaaggtcaatggcagaaaaggaaatttcttcgttttaaaactagacagaatcattcccagaaactgcgttgtgatgtgttcgttcaactcacagagtttaacctttctgttcatagagcagttaggaaacactctgtttgtaaagtctgtaagtggatattctgacgtcttgtggccttcgttggaaacgggatttcttcatattctgctagacagaagaattctcagaaacttcgttgtgttgtgtgttttcaactcacagagttgaacgatcctttacacagagcagacttgaaacactctttttgtggaatttgcaagtggagatttcagccgctttgaggtcaatggtagaaaaggaaatatcttcgtataaaaactagacagaatgattctcagaaacttcattgtgatgtgtgcgttcaactcacagagtttaacctttcttttcatagagcagttaggaaacactctgtttgtaaactctgcaagtggatattcagacctctttgaggccttcgttggaaacgggatttctccatactgtgctagacagaagaattctcagtaacttccttgtgttgtgtgtattcaactgacagagttgaactttcatttcgagagagagcagatttgaaacactgtttttgtggaatttgcaagtggagatttcaagcgctttggggccaaaggcagaaaaggaaatatcttcgtataaaaactagacagaatcattctcaggaactactgcgtgatgtgtgggttcaactctcagagtttaacttttcttttcattcagcggtttggaaacactctgtttgtaaagtctgcacgtggaaattttgaccacttagaggccttcgttggaaacgggtttttttcatgtaaggctagacagaagaattcccagtaacttccttgtgttgtgtgcattcaactcacagagttgaacgttcccttagacagagcagatttgaaacactctatttgtgcaatttgcaagtgtagttttcaagctctttaaggtcaacggcagaaaaggaaatatcttcgtttcaaaactagacagaatgattctcataaactcctttgtgatgtgtgcattcaactcacagagtttcacctttcttttcatagagcagttaggaaacactctgtttgtaaagtctgcaagtggatattcagacctccttgaggccttcgttggtaacgggatttcttcatattctgctagacagaagaattctcagtaacttccttgtgttgtctgtattcaactcacagagttgaacgatcctttacacagagcagacttgaaacactctttttgtggaatttgcaagtggagatttcagccgctttgaggtcaatggtagaaaaggaaactatcttcgtataaagactagacagaatgattctcagaaacttctttgtgatgtgtgcgttcaactcacagagtttaacctttcttttcatagagcagttaggaaacactctgtttgtaaactatgcaagtggatattcagacctctttgaggccttcgttggaaacgggatttcttcatactatgctagacagaagaattcccagtaacttccttgtgttgtgtgtgttcaactcacagaggtgaacggtcctttacacagagcagatttgagacactctttttgtggaatttgctaatggagatttcaagcgctttgaggccaaaggcagaaaaggaaatatcttcgtataaaaactagacagaatcattctcagaaactgctgcgtgatgtgggcgttcaactctcagagtttaacttttcttttcattcagcggtttggaaacactctgtttgtaaagtctgcacgtggatattttgaccacttagaggccttcgttggaaacgggtttttttcatgtaaggctagacagaagaattcccagtaacttccttgtgttgtgtgcattcaactcacagagttgaacgttcccttagacagagcagatttgaaacactctatttgtgcaatttgcaagtgtagatttcaagcgctttaaggtcaacggcagaaaaggaaatatcttcgtttcaaaactagacagaatcattcctacaaactgcgttgtgatgtgttcgttcaactcacagagtttaacctttctgttcatagagcagttaggaaacactctgtttgtaaagtctgcaagtggatattcagacctccttgaggccttcgttggaaacgggatttcttcatattctgctagacagaagaattctcagtaacttccttgtgttgtgtgtattcaactcacagagttgaacgatcctttacacagaacagacttgaaacactctttttgtggaatttgcaagcgcagatttcagccgctttgaggtcaatggtagaacaggaaatatcttcctatagaaactagacagaatgattctcataaactcctttgtgatgtgtgcattcaactcacagagtttcacctttcttttcatagagcagttaggaaacactctgtttgtaaagtctgcaagtggatattcagacctccttgaggccttcgttggaaacgggatttcttcatattctgctagacagaagaattctcagtaacttccttgtgttgtgtgtattcaactcacagagttgaacgatcctttacaaagagcagacttgaaaaactctttttgtggaatttgcaagtggagatttcagccgctttgaggtcaatggtagaaaaggaaactatcttcgtataaagactagacagaatcattctcagaaactgctctgcgatgtgttcgttcaactctcagagtttaacttttcttttcattcagcagtttggaaacactctgtttgtaaagtctgcacgtggatattttgaccacttagaggccttcgttggaaacgggtttttttcctgtaaggctagacagaagaattcccagcaacttccttgtgttgtgtgcattcaactcacagagttgaacgttcccttagacagagcagatttgaaacactctatttgtgcaatttgcaagtgtagatttcaagcgctttaaggtcaatggcagaaaaggaaatatcgtcgtttcaaaactagacagataatcattcccacaaactgcgttgtgatgtgttcgttcaactcacagggtttaacctttctgttcatagagcagttaggaaacactctgtttgtaaagtctgtaagtggatattctgacatcttgtggccttcgttggaaacgggatttcttcatattctgctagacagaagaattctcagtaacttccttgtgttgtgtgtattcaactcaccagagttgaatgatcctttacacagaacagtcttgaaacactctttttgtggaatttgcaagtggagatttcagccgctttgaggtcaatggtagaataggaaatatcttcctatagaaactagacagaatgattctcagaaactcctttgtgatgtgtgcgttcaactcacagagtttaacctttcttttcatagcgcagttgggaaacactctgtttgtaaagtctgcaagtggatattcagacatccttgaggctttcgttggaaacgggatttcttcatattctgctataaagaagaattctcagtaacttccttgtgttttgtgtattcaactgacagagttgaactttcatttagagagagcagatttgaaacactgtttttgtggaatttgcaagtggagatttcaagcgctttgggaccaaaggcagaaaaggaaatatcttcgtataaaaactagacagaatcattctcagaaactgctgcgtgatgtgtgcgttcaactctcagagtttaacttttcttttcattcagcggtttggaaacactctgtttgtaaagtctgcacgtggatattttgaccacttagaggccttcgttggaaacgggtttttttcatgtaaggctagacagaagaattcccagtaacttccttgtgttgtgtgcattcaactcacagagttgaacgttcccttagacagagcagatttgaaacactctatttgtgcaatttgcaagtgtagatttcaagcgcattaaggtcaatggcagaaaaggaaatatcttcgtttcaaaattagacagaatgattctgagaaactcctttgtgatgtgtgcgttcaactcacagagttcaacctttcttttcatagagcagttgggaaacactctgtttgtaaagtgtgcaagtggatattcagacctccttgaggccttcgttggaaacgggatttcttcatattatgctagacagaagaattctcagtaacttccttgtgttgtgtgaattcaactcacaaagttgaacgatcctttacacagagcagacttgaaacactctttttgtggaatttgcaggtgtagatttcagccgctttttattcaatggtagaataggaaatatcttcctatagaaactagacagaatgattctcagaaactcctttgtgatgtgtgcgttcaactcacagagtttaacctttcttttcatagagcagttaggaaacactctgtttgtaaagtctgcaagaggatattcagacctctttgaggccttcgttggaaacgggtttttttcatataaggctagacagaagaattcccagtaacttccttgtgttgtgtgtgttcaactcacagagttgaactttcatttacacagagcagatttgaaacactctttttgtggaatttgcaagcggagatttcaagcgctttgaggccaaaggcagaaaaggaaatatctccgtttcaaaactagacagaatcattctcagaaactgctctgcgatgtgtgcattcaactctcagagtttaatttttcttttcattcagcagtttggaaacattctctttgtaaagtctgcacgtggatattttgaccacttagaggccttcgttggaaacgggttttattcttgtaaggctagacagaagaattcccagtaacttccttgtgttgtgtacattcaactcacagagttgaacgttcccttagacagagcagatttgaaacactctttttgtgcaattggcaaatggagatttcaagcgctttaaggtcaatggcagaaaaggaaatatcttcgtttcaaaactagacagaatgattctcagaaactcctttgagatgtgtgtgttcaactcacagagtttaacctttcttttcatagagcagttaggaaacactctgtttgtaaactctgcaagtggatattcagacctctttgaggccttcgttggaaaccggatttcttcatactgtgctagacagaagaattctcagaatcttccttgtgttgtgtgtattcaactcacagagttgaacgatcctttacacagagcagacttgaaacactctttttgtggaatttgcaagtggagatttcagccgctttgaggtccacggtagaaaaggaaatatcttcgtataacaactagacagaatgattctcagaaacttctttgtgatgtgtgcgttcaactcacagagtttaacctttcttttcatagagcagttacgaaacactctgtttgtaaactctgcaagtggatattcagacctctttgaggccttcgttggaaacgggatttcttcatactatgctagacagaagaattctcagtaacttccttgtgttgtgtgtattcaactgacagagttgaactttcatttagagagagcagacttgaaacactgtttttgtggaatttgcaagtggagatttcaagcgctttggggccaaaggcagaaaaggaaatatcttcgtataaaaactagacagaatcattctcagaaactgctctgcgatgtgtgcgttcaactctcagagtttaacttttcttttcattcagaagtttggaaacactctgtttgtaaagtctgcacgtggataacttgaccacttagaggccttcgttggaaacgggtttttttcatgtaaggctagacagaagaattctcagtaacttccttgtgttgtgtgtattcaactcacatagttgaacgatcctttacacagaacagacttgtaacactctttttgtggaatttgcaagtggagatttcagccactttgaagtcaaaggtagaaaaggaaataacttcctataaaaactagacagaatgattctcagtaaactcctttgtgatgtgtgcgttcaacacacagagtttaacttttcttttcatagagcagttaggaaacactctgtttgtaaagtctgcaagtggatattcagacctctttgaggccttcgttggaaacgggatttcttcatattctgctagacagaataattctcagtaacttccttttgttgtgtgtattcaactcacagagttgaacgatcctttacagagagcagacttgaaacactctttttgtggaatttgcaagtggagatttcagccgctttgaggtcaatggtagaataggaaatatcttcctatagaaactagacagaatgattctcagaaactcctttgtgatgtgtgcgttcaactcacagagtttaacctttcttttcatagagcagttgggaaacactctgtttgtaaagtctgcaagtggatattcagacatccttgaggctttcgttggaaaagggatttcttcatattctgctagaaagaagaattctcagtaacttccttgtgttgtctgtattcaactcacagagttgaacgatcctttacacagagcagacttgaaacactctttttgtggaatttgcaagtggagatttcagccgctttgaggtcaatggtagaataggaaatatcttgctatagaaactatacagaatcattctcagaaactgctgcgtgatgtgtgcgttcaactctcagagtttaacttttcttttcattcagcggtttggaaacactctgtttgtaaagtctgcacgtggaaattttgaccacttagaggccttcgttggaaacgggtttttttcatgtaaggctagacagaagaattcccagtaacttccttgtgttgtgtgcattcaactcacagagttgaacgttcccttagacagagcagatttgaaacactctatttgtgcaatttgcaagtgtagatttcaagcgctttaaggtcaatggcagaaaaggaaatatcttcgtttcaaaactagacagaatcattcccacaaactgcgttgtgatgtgttcgttcaactcatagagtttaacctttctgttcatagagcagttaggaaacactctgtttgtaaagtctgtaagtggatattctgacatcttgtggccttcgttggaaacgggatttcttcatattctgctagacagaagaattctcagtaacttccttgtgttgtgtgtattcaactcacagagttcaacgatcctttacacagagcagactcgaaacactctttttgtggaatttgcaattggagatttcagccgctttgaggtcaatggtagaaaaggaaatatcttcgtataaaaactagacagaatgattctcagaaactcctttgtgatgtgtgcgttcaactcacagagtttaacctttcttttcatagagcagttaggaaacactctgtttgtaaagtctgcacgtggatatttggacttctttgaggccttcgttggcaacggggttttttcatgtaaggctagacagaagaattctcagtaacttccttgtgttgtgtgtattcaactgacagagctgaactttcatttagagagagcacatttgaaacactgtttttgtggaatttgcaagtggagatttcaagcgctttggggccaaaggcagaaaaggaaatatcttcgtataaaaactagacagaatcattctcagaaactgctctgcgatgtgtgcattcaactctcagagtttaatttttcttttcattcagcagtttggaaacactctctttgtaaagtctgcacgtggatattttgaccacttagaggccttcgttggaaacgggttttattcctgtaaggctagacagaagaattcccagtaacttccttgtgttgtgtacattcaactcacagagttgaacgttcccttagacagagcagatttgaaacactctttttgtgcaattggcaaatggagatttcaagcgctttaaggtcaatggcagaaaaggaaatatcttcgtttcaaaactagacagaatcattcccacaaactgcgttgtgatgtgttcgttcaactcacagagtttaacctttcttttcatagagcagttaggaaacagtctgtttgtcaattctgtaagtggatattctgacatcttgtggccttcgttggaaacgggatttcttcacattctgctagacagaagaattatcagtaacttccttgtgttgtgtgtattcaactcacagagttgaacgatcctttacacagagcagacttgaaacactctttttgtggaatttgcaagtggagatttcagccgctttgaggtcaatagtagaaaaggaaatatcttcgtagaaaaactagacagaatgattctcagaaactcctttgtgatgtgtgcgttcaactcacagagtttaacctttcttttcatagagtagttaggaaacactctgtttgtaaagtctgcaagtggatattcagacatccttgaggctttcgttggaaacgggatttcttcatattctgctagaaagaataattctcagtaacttccttgtgttgtgtgtattcaactcacagagttgaatgatcctttacacagagcagacttgaaacactctttttgtggaatttgcttgtggagatttcagccgctttgaggtcaatggtagaataggaaatatcttcttatagaaactagacagaatcattctcagaaactgctctgcgatgtgtgcgttcaactctcagagtttaacttttcttttcattcagcagtttggaaacactctgtttgtaaagtctgcacgtggataacttgaccacttagaggccttcgttggaaacgggtttttttcatgtaaggctagacagaagaattcccagtaacttccttgtgttgtgtgcattcaactcacagagttgaacgttcccttagacagagcagatttgaaacactctatttgtgcaatttgcaagtgtagatttcaagcgctttaaggtcaatggcagaaaaggaaatgtcttcgtttcaaaactagacagaatcattcccacaaactgcgttgtgatgtgttcgttcaactcacagagtttaacctttctgttcatagagcagttaggaaacactctgtttgtaaagtctgtaagtggatattctgacatcttgtggccttggttggaaacgggatttcttcatattctgctagacagaagaattctcagtaacttccttgtgttgtgtgtattcaactcacagagttgaacgatggtttacacagagcagatttgaaacactctttttgtggaatttgcaagtggagatttcagcctctttgaggtcaatggtagaaaaggaaatatcttcgtataaaaactagacagaatgattctcagaaactcctttgtgatgtgtgcgttcaaatcacagagtttaacttttcttttcatagagcagttaggaaacactctgtttgtaaagtctgcaagtggatattcagacctctttgaggccttcgttggaaacgggattttttcatattatgctagacagaagaattctcagtaactgccttgtgttgtgtttattcaactcacagagttgaacgatcctttacacagagcagacttgaaatactctttttgtggaatttgcaagtggagatttcagccgctttgaggtcaatggtagaataggaaatatcttcctatagaaactagacagaatgattctcagaaactcatttgtgatgtgtgcgttcaactcacggagtttaacctttcttttcatagagcagttaggaaacactctgtttgtaaagtctgcaagtggatattcagacctctttgaggtcttcgttggaaacgggatttcttcatattctgctagacagaagaattcccagtaacttcccttgtgttgtgtacattcaactcacagagttgaacgttcccttagacagagcagatttgaaacactctttttgggcaattggcaagtggagattacaagcgctttaaggtcaatggcagaaaaggaaatatcttcgtttcaaaactagacagaatcattcccacaaactgcgttgtgatgtgttcgttcaactcacagagtttaacctttcggttcatagagcagttaggaaacactctgtttgtaaagtctgtaagtggatattctgacatcttgtggccttcgttggaaacgggatttcttcatattctgctagacagaagaattctcagtaacttccttgtgttgtgtgtattcaactcacagagttgaacgatcctttacacagagcagacttgaaacactctttttgtggaatttgcaagtggagatttcagccgctttgaggtcaatggtagaataggaaatatcttccaatagaaactagacagaatgattctcagaaactcctttgtgatgtgtgcgttcaactcacagagtttaacctttcttttcatagagcagttaggaaacactctgtttgtaaagtctgcaagtggatattcagacctctttgagtccttcgttggaaacgggatttcttcatattctgctagacagaagaattcccagtaacttccttgtgttgtgtgtgttcaactcacagagttgaactttcatttacacagagcagatttgaaacactctttttgtggaatttgcaagtggagatttcaagcgctgtgaggccaaaggcagaaaaggaaatatcttcgtataaaaactagacagaatcattctcagaaactgctctgcgatgtgtgcgttcaactctcagagtttaacttttcttttcattcagcagtttgaaaacactctgtttgtaaagtctgcacgtggataatttgaccacttagaggccttcgttggaaacgggtttttttcatgtaaggctagacagaagaattcccagtaacttccttgtgttgtgtacattcaactcacagagttgaacgttcccttagacagagcagatttgaaatactctttttgtgcaattggcaagtggagatttcaagcgctttaaggtcaatggcagaaaaggaaatatcttcgtttcaaaactagacagaatcattcccacaaactgcgttgtgatgtgttcgttcaactcacagagtttaacctttcttttcatagagcagttaggaaacagtctgtttttcaattctgtaagtggatattctgacatctagtggccttcgttggaaacgggatttcttcatactgtgctagacagaagaattctcagtaacttccttgtgttgtgtgtatttaactcacagagttgaacgatcctttacacagagcagacttgaaacactcttttggtggaatttgcaagtggatatttcagccgctttgaggtcaatggtagaataggaaatatcttcctatagaaactagacagaatgattctcagaaactcctttctgatgtgtgcattcaactcacagagtttaacctttcttttcatagagcagttaggaaacactctgtttgtaaagtctgcaagtggatattcagacctctttgaggccttcgttggaaacgggatttcttcatattctgctagagagaagaattcccagtaacttccttgtgttgtgtgtgttcaactcacagagtttgaactttcatttacacagagcagatttgaaacactctttttgtggaatttgcaagtggagatttcaagcgctttgaggccaaaggcagaaaaggaaatatcttcgtttgaaaactagacagaatcattctcagaaactgctctgcgatgtgtgccttcaactctcagagtttaacttttcttttcattcagcagtttggaaacactctgtttgtaaagtctgcacgtggatattttgaccacttagaggccttcgttggaaatgggtttttttcctgtaaggctagacagaagaattcccagtaacttccttgtgttgtgtgcattcaactcacagagttgaacgttcccttagacagagcagatttgaaacactctatttgtgcaatttgcaagtgtagatttcaagcgctttaaggtcaatggcagaaaaggaaatatcttcgtttcaaaactagacagaatcattcccacaaactgcgttgagatgtgttcgttcaactcacagagtttaacctttccgttcatagagcagttaggaaacacactgtttgtaaagtctgtaagtggatattctgacatcttgtggccttcgttggaaacgggatttcttcatattctgctagacagaataattctcagtaacttccttgtgttgtgtgtattcaactcacagagttgaacgatcctttacagagagcagacttgaaacactctttttgtggaatttgcaagtggagatttcggccgctttgaggtcaatggtagaataggaaatatcttcctatagaaactagacataatgattctcagaaactcctttgtgatgtgtgcgttcaactcacagagtttaacctttcttttcctagagcagttagtaaacactctgtttataaagtctgcaagtggatattcagacccctttgaggccttcgttggaaacgggatttcttcatattatgctagacagaagaattctcagtaacttccttgtgttgtgtgtattcaactgacagagttgaactttcatttagagagagcagatttgaaacactgtttttgtggaatttgcaagaggagatttcaagcgctttggggctaaaggcagaaaaggaaatatcttcgtataaaaactagacagaatcattctcagaaactgctgcgtgatgtgtgcgttcaactctcagagtttaacttttcttttcattcagcagtttggaaacactctgtttgtaaagtctgcacgtggaaattttgaccacttagaggccttcgttggaaacgggtttttttcatgtaaggctagacagaagaattcccagtaacttccttgtgttgtgtgcattcaactcacagagttgaacgttcccttagacagagcagatttggaacactctatttgtgcaatttgcaagtgtagatttcaagcgctttaaggtcaacggcagaaaaggaaatatcttcgtttcaaaactagacagaatcattcccacaaactgcgttgtgatgtgttcgttcaactcacagagtttaacctttctgttcatagagcagttaggaaacactctgtttgtaaagtctgtaagtggatattctgacatcttgtggccttcgttggaaactggatttctccatattctactagacagaataattctacagtaacttccttgtgttgtgtgtattcaactcacagagttgaaggatcctttacagagagcaggcttgaaacactctttttgtcgaatttgcaagtggagatttcagccgctttgaggtcaatggtagaataggaaatatcttcttatagaaactagacagaatgattctcataaactcctttgtgatgtgtgcgttcaactcacagagtttaacctttctgttcatagagcagttaggaaacactctgtttgtaaagtctgcaagtggatattcagacctccttgaggccttcgttggaaacgggatttcttcatattctgctagacagaagaattctcagtaacttccttgtgttgtgtgtattcaactcacagagttgaatgatcctttacacagagcagacttgaaacactctttttgtggaatttgcaagtggagatttcagccgctttgaggacaatggtagaaaagtaaatatcttcgtataaagactagacagaatcattctcagaaactgctgcgtgatgtgtgcgttcaactctcagagtttaacttttcttttcattcagcggtttggaaacactctgtttgtaaagtctgcacgtggatattttgaccacttagaggccttcgttggaaacgggtttttttcatgtaaggctggacagaagaattcccagtaacttccttgtgttgtgtgcattcaactcacagagttgaacgttcccttagacagagcagatttgaaacactctatttgtgcaacttgcaagtgtagatttcaagccctttaaggtcaacggcagaaaaggaaatatcttcgtttcaaaactagacagaatcattcccacaaactgcgttgtgatgtgttcgttcaactcacagagtttaacctttctgttcatagagcagttaggaaacactctctttgtaaagtctgtaagtggatattctgatatcttgtggccttcgttggaaacgggatttcttcatattctgctagacagaagaattctcagtaacttccttgtgttgtgtgtatacatctcacagagttgaacgatcctttacacagagcagacttgaaacactctttttgtggaatttgcaagtggagatttcagccgctttgaggtccatggtagaaaaggaaatatcttcgtataaaaactagacagaatgattctcagaaactcctttgtgatgtgtgcgttcaactcacagagtttaacctttcttttcatagagcagttaggaaacactctgtttgtaaagtctgcaagtgaatattcagacatccttgaggttttcgttggaaacgggatttcttcatattctgctagaaagaagaattctcagtaacttccttgtgttgtgtgtattcaactcacagagttgaatgatcctttacacagaacagtcttgaaacactctttttgtggaaattgcaagtggagatttcagccgctttgaggtcaatggtagaataggaaatatcttcctatagaaactagacagaatcattctcagaaactgctctgcgatgtgtgcgttcaactctctgagtttaactttgcttttcattcagcagtttggaaacactctgtttgtaaagtctgcacgtggataatttgaccacttagaggtcttcgttggaaacgggattttttcatgtaaggctagacagaagaattcccagtaacttccttgtgttgtgtacattcaactcacagagttgaacggttcccttagacagagcagatttgaaacactctttttgtgcaattggcaaatggatatttcaagcgctttaaggtcaatggcagaaaaggaaatatcttcgtttcaaaactggacagaatcattcccacaaactgcgttgtgatgtgttcgttcaactcacagagtttaacctttcttttcatagagcagttaggaaacactctgtttgtaaattctgtaagtggatattctgacatcttgtggccttcgtttgaaacgggatttcttcatattctgctagacagaataattctcagtaacttccttgtgttgtgtttattcaactcacagagttgaatgatcctttacacagagcagacttgaaacactctttttgtggaatttgcaagtggagatttcagccgctttgaggtcaatggtagaaaagtaaatatcttcctataaagactagacagaatgattctcagaaactcctttgtgatgtgtgcgttcaactcacagagtttaacctttctgttcatagagccgttaggaaacactctgtttgtaaagtctgcaagtggatattcagatctctttgaggccttcgttggaaacgggatttcttcatattatgctagacagaagaattcccagtaacttccatgtgttgtgtgtgttcaactcacagagttgaactttcatttacacagagcagatttgaaacactctttttgtggaatttgcaaatggaggtttcaagcgctttgaggccagaggcagaaaaggaaatatcttcgtataaaaactagacagaatcattctcagaaactgctctgcgatgtgtgcgttcaactctcagagtttaacttttcttttcattcagcagtttggaaacactctgtttgtaaagtctgcatgtggataatttgaccacttagaggtctttgttggaaacgggtttttttcatgtaaggctagacagaagaattctcagtaacttccttgtgttgtgtgtattcaactcacagagttgaacgttcctttacacagagcagacttgtaacactctttttgtggaatttgcaagtggagatttcagccgctttgaagtcaaaggtagaaaaggaaatatcttcctataaacactagacagaatcattggcacaaactgcgttgtgatgtgttcgttcaactcacagagtttaacctttcttttcatagagcagttaggaaacagtctgtttgtaaattctgtaagtggatattctgacatcttgtgaccttcgttggaaacgggatttcttcatattctgctagacagaagaattctcagtaacttccttgtgttgtgtgtattcaactcacagaattgaacgatcctttacacagagcagacttgaaacattctttttgtggaatttgcaagtggagatttcagccgctttgaggtcaatcgtagaataggaaatatcttcctatagaaactagacagaatgattctcagaaactcctttgtgatgtgtgcgttcaactcacagagtttaacctttcttttcatagagcagttaggaaacactctgtttgttaagtctgcaagtggatattcagtcctctttgaggccatcgttggaaacgggatttcttcatattatgctagacagaagaattctcagtaacttccttgtgttgtgtgtattcaactcacagagttgaacgatcctttacacagagcagacttgaaacactctttttgtggaatttgcaagtggagatttcagccgctttgaggtcaatggttgaataggaaatatcttccaatagaaactagacagaatgattctcagaaactcctttgtgatgtgtgcgctcaactcacagagtttaacttttcttttcatagagcagttaggaaacactctgtttataaagtctgcaagtggatattcagacctctttgaggccttcgttggaaacgggagttcttcatattctgctagacagaagaattctcagaaactcccttgtgttgtgtgtattcaactgacagagttgaactttcatttagacagagcagatttgaaacactctttatgtggaattggccagtggagatttgaagcgctttgagaccaaaggcagaaaaggaaatatcttcgtttcaaaactagacagaatcattcccacaaactgcgttgtgatgtgttcgttcaacacacagggtttaacctttcttttcatagagcagttaggaaacactctgtttgtaaagtctgtaagtggatattctgacatcatgtggccttcgttggaaacgggatttcttcatattctgctagacagaagaattctcagtaacttccttgtgtagtgtgtattcaactcacagagttgaacgatcctttacacagagcagacttgtaacactctttttgtggaatttgcaagtggagatttcagccactttgaagtcaaaggtagaaaaggaaataacttcctataaaaactagacagaatgattctcagaaactcctttgtgatgtgtgcgttcaactcacagagtttaacctttcttttcatagagcagttaggaaacactctgtttgtaaagtctgcaagtggatattcagacctctttgaggccttcgttggaaacgggtttttttcatataaggctagatagaagaattctcagtaacttccttgtgttgtgtgtattcaactgacagagttgaactttcatttagagagagcagatttgaaacactgtttttgtggaatttgcaagtggagatttcaagcgctttggggccaaaggcagaaaacgaaatgtcttcgtataaaaactagacagaatcattctcagaaaccgctctgtgatgtgtgcgttcaactctcagagtttaacttttcttttcattcagcagtttggaaacactctgtttgtaaagtctgcacgtggatattttgaccacttagaggccttcgttggaaacgggttttttttcatgtaaggctagacagaagaattcccagtaacttccttgtgttgtgtacattcaactcacagagttgaacgttcccttagacagagcagatttgaaacactctttttgtgcaattggcaagtggagatttcaagcgctttgaggtcaatggcagaaaaggaaatatcttcgtttcaaaactagacagaatgattctcataaactcctctgtgatgtgtgcgttgaactcacagagtttaacttttcttttcatagagcagttaggaaacactctgtttgtaaagtctgcaagtggatattcagacgtctttgaggccttcgttggaaacgggatttcttcatattatgctagacagaataattctcagtaacttccttgtgttgtgtgtattcaactcacagagttgaacgatcctttacagagagcagacttgaaacactctttttgtggaatttccaattggagatttcagccgctttgaggtcaatcgtagaataggaaatatcttcctatagaaattagatagaatgattctcagaaactcctttgtgatgtgtgcgttcaactcacagagtttaacctttcttttcatagagcagttaggaaacactctctaaagtctgcaagtggatattcagacctccttgaggtcttcgttggaaacgggatttcttcatattctgctagacagaagaattcccagtaacttccttgtgttgtgtgtgttcaactcacagagttgaactttcatttacacagagcagattggaaacactctttttgtggaatttgcaagtggagatttcaagcgctttgaggccaaaggcagaaaaggaaatatcttcgtataaaaactagtcagaatcattctcagaaactgctctgtgatgtgtgcgttcaactctcagagtttaacttttcttttcattcagcagtttggaaacactctgtttgtaaagtctgcacgtggatattttgaccacttagaggccttcgttggaaacgggttttttttcatgtaaggctagacggtagcattcccagtaacttccttgtgttgtgtgcattcaactcacagagatgaacgttcccttagacagagcagatttgaaacgctctatttgtgcaatttgcaagtgtagatttcaagcactttaaggtcaatggcagaaaaggaaatatcttcgtttcaaaactagacagaatgattctcagaaaatcttttgtgatgtgtgcgttcaactcacagagtttaacttttcttttcatagagcagttaggaaacactctgtttgtaaagtctgcaagtggatattcagacctgtttgaggccttcgttggaaacgggatttcttcatattctgctagacagaagaattctcagtaacttccttgtgttgtgtgtattcaactcacagagttgaaggatcctttacagcgagcaggcttgaaacactctttttgtcgaatttgcaagtggagatttcagccgctttgaggtcaatggtagaataggaaatatcttcttatagaaactagacaaaatgattctcagaaactcctttgtgatgtgtgcgttcaactcacagagtttaacctttcttttcatagagcaggtaggaaacactctgtttgtaaagtctgcaagtggatattcagacctccttgaggccttcgttggaaacgggattccttcatattctgctatacagaaacaattcccagtaacttccttgtgttgtgtgtgttcaactcacagagttgaactttcatttacacagagcagatttgaaacactctttttgtggaatttgcaagtggagatttcaagcgctttgaggccaaaggcagaaaaggaaatatcttcgtataaaaactagacagaatcattctcagaaactgctctgcgatgtgtgcgttcaactctcagagtttaacttttcttttcattcagcagtgtggaaacactctgtttgtaaagtctgcacgtggatattttgaccacttagaggccttcattggaaacgggtttttttcctgtaaggctagacagaagaattctcagtaacttccttgtgttgtgtgtattcaactcacagagttgaacgatcctttacacagagcagacttgtaacactctttttgtggaatttgcaagtggagatttcagccgctttgaagtcaaaggtagaaaaggaaatatctccctataaaaactagacagaatgattctcagaaacttctttgtgatgtgtgcgctcaactcacagagtttaacctttcttttcatagagcagttaggaaacactctgtttgtaaagtctgcaagtggatattcagacctctttgaggccttcgtaggaaacgggatttcttcatattatgctagacagaagaattctcagtaacttccttgtgttgtgtgtattcaactcacagagttgaacgatcctttacacagagcagacttgaaacactctttttctggaatttgcaagtggagatttcagccgctttgaggtcaatggtagaataggaaatatcttcccatagaaactagacagagtgattctcagaaactcctttgtgatgtctgcgttcaactcacagagtttaacctttcttttcgtagagcagttaggaaacactctgtttgtaaagtctgcaagtggatattcagacctccttgaggccttcgttggaaacgggatttcttcatattctgctatacagaagaattctcagaatcttccttgtgttgtttgtattcaactcacagagttgaactttcatttacacagagcagatttgaaacactctttttgtggaatttgcaaatggagatttcaagcgctttgaggccaaaggcagaaaaggaaatatcttcgtataaaaactagacagaatcattctcagaaactgctgcgtgatgtgtgcgttcaactctcagagtttaacttctcttttcattcagcggtttggaaacactctgtttgtaaagtctgcacgtggaaattttgaccacttagaggccttcgttggaaacgggtttttttcatttaaggctagacagaagaattcccagtaacttccttgtgttgtgtgcattcaactcacagacttgaacgttcccttagacagagcagatttgaaacactctatttgtgcaatttgcaagtgtagatttcaagcgctttcaggtcaatggcagaaaaggaaatatcttcgtttcaaaactagacagaatcattcccacaaacagcgttgtgatgtgttcattcaactcacagagtttaacctttcttttcatagagcagttaggaaacagtctgtttgtaaattctgtaagtggatattctgacatcttgtggccttcgttggaaacgggatttcttcatattctgctagacagaagaattctcagtaacttccttgtgttgtgtgaattcaactcacagagttgaacgatcctttacacagagcagacttgaaacactctttttgtggaatttgcaagtggagatttcagccgctttgaggtcaatggtagaaaaggaaactatcttcatataaagactagacagaatgattctcagaaactcctttgtgatgtgtgcgttcaactcacagaatttaacctttcttttcatagagcagttaggaaacactctgtttgtaaagtctgcaagtggatattcagacctctttgaggccttcgttggaaacgggtttttttcatataaggctagacagaatcattctcagaaactgctctgcgatgtgtgcgttcaactctcagagtttaacttttcttttcattcagcagtttggaaacactctgtttgtaaagtctgcacgtggataatttgaccacttagaggccttcgttggaaacgggttgttttcatgtaaggctagacagaagaattcccagtaacttaccttgtgttgtgtacattcaactcacagagttgaacgttcccttagacagagcagatttgaaacactttttttgtgcaattggcaaatggagatttcaagcgctttaaggtcaatggcagaaaaggaaatatcttcgtttcaaaactagacagaatcattcccacaaactgcgttgtgatgtgttcgttcaactcacagagtttaacctttctgttcatagagcagttaggaaacactctgtttgtaaagtctgcaagtggatattctgacatcttgtggccttcgttggaaacgggatttcttcatcttctgctagacagaagaattctcagtaacttccttgtgttgtgtgtattcaactcacagagttgaacgatcctttacacagagcgcacttgaaacactcgttttgtggaatttgcaagtggagatttcagccgtgttgaggtaaatggtagaaaaggaaatatcttcgtataaaaactagacagaatgattctcagaaactcctttgtgatgtgtgcgttcaactcacagagtttaacctttcttttcatagagcagttaggaaacactctgtttgtaaagtctgcaagtggatattcagacctccttgaggccttcgttggaaacgggatttcttcatattctgctatacagaagaattctcagaaacttccttgtgttgtgtgtattcaactcacagagttgaacgatcgtttacacacagcagacttgagacactctttttgtggaaattgtaagtggagatttcagccgctttgaggtcaatggtagaaaaggaaatatcttcatataaaaactagacagaatcattctcagaaactgctgtgtgatgtgtgcgttcaactctcagagtttaacttttcttttcattcagcggtttggaaacactctgtttgtaaagtctgcacgtggatattttgaccacttagaggccttcgttggaaacgggtttttttcatgtaaggctagacagaagaattcccagtaacttccttgtgttgtgtgcattcaactcacagagttgaacgttcccttagacagagcagatttgaaacactctatttgtgaatttgcaagtgtagatttcaagcgctttaaggtcaaaggcagaaaaggaaatatcttcgtttcaaaactagacagaattattcccacaaactgcgttgtgatgtgttcgttcaactcacagagtttaacctttctgttcatagagcagttaggaaacactctgtttgtaaagtctataagtggatattctgacatcttgtggccttcgttggaaacgcgatttcttcatattctgttagacagaagaattctcagaatcttccttgtgttgtgtgtattcaactcacacagttgaacgatggtttacacagagcagatttgaaacactatttttgtggaatttgcaagtggagatttcagccgctttgaggtcaatggtagaaaaggaaatatcttcgtataaaaactagagagaatgattctcagaaactcctttgtgatgtgtgtgttcaactcacagagtttaacctttcttttcatagagcagttagtaaacactctgtttataaagtctgcaagtggatattcagacccctttgaggccttcgttggaaatgggattgcttcatattatgctagacagaagaattctcagtaacttccttgtgttgtgtgtattcaactgacagagttgaactttcatttggagagagcagatttgaaacactgtttttgtggaatttgcaagtggaaatttcaagcgctttggggtcaaaggcagaaaaggaaatatcttcgtataaaaactagacagaatcattctcagaaactgctgcgtgatgtgtgcgttcaactctcagagtttaacttttcttttcattcagcggtttggaaacactctgtttgtaaagtctgcacgtggatattttgaccacttagaggccttcgttggaaacgggttttttttcatgtaaggctagacagaagaattcccagtaacttccttgtgttgtgtgcattcaactcacagagttgaacgttcccttagacagagcagatttgaaacactctagttgtgcaatttgcaagtgtagatttcaagcgctttaaggtcaatggcagaaaaggaaatatcttcgtttcaaaactagacagaatcattcccacaaactgcgttgtgatgtgttcgttcaactcacagagtttaacctttccgttcatagagcagttaggaaacactctgtttgtaaagtctgtaagtggatattctgacatcttgtggccttcgttggaaacgggatttcttcatattctgctagacagaagaattctcagtaacttccttgtgttgtgtgtattcagctcacagagttgaacgatcctttacaccgagcagacttgaaacactctttttgtggaatttgcaagtggtgatttcagccgctttgaggtcaatggtagaaaaggaaactattttcgtataaagactagacagaatgattctcagaaactcctttgtgatgtgtgcgttcaactcacagaagtttaacctttcttttcatagagcagttatgaaacactctgtttgtaaagtctgcaagtggatattcagacctctttgaggccttcgttggaaacgggtttttttcatataaggctagacagaagaattctcagtaacttccttgtgttgtgtgtattcaactgacagagttgaactttcatttagagagagcagatttgaaacactgtttttgtggaatttgcaagtggagatttcaagcgatttggggccaaaggcagaaaaggaaatatcttcgtataaaaactagacagaatcattctcagaaactgctgcgtgatgtgtgcgttcaactctcagagtttaacttttcttttcattcagcggtttggaaacactctgtttgtaaagactgcacgtggatattttgaccacttagaggccttcgttggaaacgggattttttcatgtaaggctagacagaagaattcccagtaacttccttgtgttgtgtgcattcaactcacagagttgaacgttcccttagacagagcagatttgaaacactctatttgtccaatttgcaagtgtagatttcaagcgctttaaggtcaacggcagaaaaggaaatatcttcgtttcaaaactagacagaatcattcccacaaactgcgttgtgatgtgttcgttcaacccacagagtttaacctttctgttcatagagcagttaggaaacacactgtttgtaaagtatgaaagtggatattctgacatcttgtggccttcgttggaaacgggatttcttcatattctgctagacagaagaattctcagtaacttccttgtgttgtgtgtattcaactcacagaattgaacgatcctttacacagagcagacttgaaacactctttttgtggaatttgcaagtggagatttcagccgctttgaggtcaatggtagaaaaggaaatatcttcgtatagaaacaagacagaatgattctcagaaacttcattgtgatgtgtgcgttcaactcacagagtttaacctttcttttcatagagcagttaggaaacactctgtttgtaaactctgcaagtcgatattcacacctctttgaggccttcgttggaaacgggatttcttcatactgtgctagacagaagaattcccagtaacttccttgtgttgtgtgtgttcaactcacagagttgaactttcatttacccagagcagatttgaaacactttttttgtggaatttgcaagtggagatttcaagcgctttgaggccaaaggcagaaaaggaaatatcttcgtttcaaaactagacagaatcattctcagaaactgctgcgtgatgtgtgcgttcaactctcagagattaacttttcttttcattcagcggtttggaaacactctgtttgtaaagtctgcacgtggatattttgaccacttagaggccttcgttggaaacgggtttttttcatgtaaggctagacagaagaattcccagtaacttccttgtgttgtgtgcattcaactcacagagctgaacgttcccttagacagagcagatttgaaacactctatttgtgcaatttgcaagtgtagatttcaagcgctttaaggtcaacggcagaaaaggaaatatcttcgtttcaaaaccagacagaatcattcccacaaactgcgttgtgatgtgtgcgttcaactcacagagttcaacttttcttttcatagagcagttaggaaacactctgtttgtaaagtctgcaagtggatattcagacctatttgaggccttcgttggaaacgggatttcttcatattctgctagacagaataattctcagtaacttccttgtgttgtgtgtattcaactcacagagttgaatgatcctttacagagagcagacttgaaacattctttttgtggaatttgcaagtggagatttcagccgctttgaggtcaatggtagaaaaggaaatatcttcgtataaagactagacagaatgattctcagaaactcctttgtgatgtgtgcgttcaactcacagagtttaacttttcttttcatagagcagttaggaaacactctgtttgtaaagtctgcaagtggatattcagacctctttgaggccttcgttggaaatgggatttcttcgtattctgctagacagaagaattctcagtaacttccttgtgttgtgtgtattcaactgacagagttgaactttcatttagagagagcagatttgaaacactgtttttgtggaatttgcaagtggagatttcaagcgcttttgggccaaaggccgaaaaggaaatatcttcgtataaaaactagacagaatcattctcagaaactgtggcgtgatgtgtgcgttcaactctcagagtttaacttttcttttcattcagcggtttggaaacactctatttgtaaagtctgcccgtggatattttgaccacttagaggccttcgttggaaacgggtttttttcatgtaaggctagacagaagaattcccagtaacttccttgtgttgtgtgcattcaacttgcagagttgaacgttcccttagacagagcagatttgaaacactctatttgtgcaatttgcaagtgtagatttcaagcgctttaaggtcaatggcagaaaaggaaatatcttcgtttcaaaactagacagaaatcattcccacaaactgcgttgtgatgtgttcgttcaactcacaggagtttaacctttcttttcatagagcagttaggaaacagtctgtttgtcaattctgtaagtggatattctgacatcttgtggccttcgttggaaacgggatttcttcatatttggctagacagaaataattctcagtaacttccttgtgttgtgtgtattcaactcacagagttgaaggatcctttacagagagcaggcttgaaacactctttttgtcgaatttgcaagtggagatttcagccgctttgaggtcaatggtagaataggaaatatcttcttatagaaactagacagaatgattctcagaaactcctttgagatgtgtgtgttcaactcacagtttaacctttcttttcatagagcagttaggaatcactctgtttgtaaagtctgcaagtggatattcagacctctttgaggccttcgttggaaacgggtttttttcatataaggctagacagaagaattctcagtaacttccttgtgttgtgtgtattcaactgacagggttgaactttcatttagagagagcagatttgaaacactgtttttgtggaatttgcaagtggagatttcaagcgctttggggccaaaggcagaaaaggaaatatcttcgtataaaaactagacagaatcattctcagaaactgctgcgtgatgtgtgcgttcaactctcagagtttaacttttcttttcattcagcggtttggaaacactctgtttgtaaagtctgcacgtggaaattttgaccacttagaggccttcgttggaaacgggtttttttcatgtaaggctagacagaagaattcccagtaacttccttgtgttgtgtgcattcaactcacagagttgaacgttcccttagacagagcagatttgaaacactctatttgtgcaatttgcaagtgtagatttcaagcgctttaaggtcaatgacagaaaaggaaatatcttcgtttcaaaactagacagaatcattcccacaaactgcgttgtgatgtgttcgttcaactcacagagttttacctttctgttcatagagcagttaggaaacactctgtttgtaaagtctgcaagtggatattcagacctccttgagaccttcgttggaaacgggatttcttcatattctgctagacagaagaattctcagtaacttccttgtgttgtgagtattcaactcacagagttgaacgatcctttacacagagcagacttgaaacactctttttgtggaatttgcaagaggagatttcagccgctttgaggtcaatggtagaaaaggaaatatcttcgtataaagactagacagaatgattctcagaaactcctttgtgatgtgtgcgttcaactcacagagttcaacctttcttttcatagagcagttgggaaacactctgtttgtaatgtctgcaagtggatattcagacttccttgaggccttcgttggaagcgggatttcttcaaattctgctagacagaataattctcagtaacttccttgtgttgtgtgtattcaactcacagatttgaacgatcctttacacagagcagacttgaaacattctttttgtggaatttgcaagtggagatttcagccgctttgaggtcaatggtagaataggaaatatcttcctatagaaactagacagaatcattctcggaaactgctctgtgatgtgtgcgttcaagtctcagagtttaacttttcttttcattcagcagtttggaaacactctgtttgtaaagtctgcacgtggatattttgaccacttaaaggccttcgttggaaacgtgtttttttcctgtaaggctagacagaagaattcccagtaacttccttgtgttgtgtacattcaactcacagagttgaacgttcccttagacagagcagatttgaaacactctttttgtgcaattggcaagtggtgatttcagccgctttgtggtcaatggtataaaaggaaatatcttcgtataaaaactagacagaatcattctcagaaactgctctgcgatgtgtgcgttcaactctcagagtttaacttttcttttcattcagcagtttggaaacactctgtttctaaagtctgcacgtggataacttgaccacttagaggccttctttggaaacgggtttttttcctgtaaggctagacagaagaattcccagtaacttccttgtgttgtgtacattcaactcacagagttgaaccgttcccttagacagagcagatttgaaacactctttttgtgcaattggcaagtgctgatttcagccgctttgaagtcaatggtagaaaaggaaatatcttcgtataaaaactagacagaatgattctcagaaacttcattgtgatgtgtgccgttcaactcacagagtttaacctttcttttcatagagcagttaggaaacactctgtttgtaaactctgcaagtggatattcagacctctttgaggccttcgttggaaacgggatttcttcatactgtgctagacagaagaattctcagtaacttcattgtgttgtgtgtattcaactcacagatttcaacgatcctttacacagagcagacttgaaatactctttttatggaatttgcaagtggagatttcagccgctttgaggtcaatgtagaataggaaatatcttcctatagaaattagacagaatcattctcagaaactgctgcgtgatgtgtgcgttcaactctcagagtttaacttttcttttcattcagcggtttggaaacactctgtttgtaaagtctgcacgtggatattttgaccacttagaagccttcgttggaaacgggtttttttcatgtaaggctagacagaagaattcccagtaacttccttgggttgtgtacattcaactcacagagttgaacgttcccttagacagagcagatttgaaacactctttttgtgcaattggcaagtggagatttcaagcgctttaaggtcaatggcagaaaaggaaatatcttcgtttcaaaactagacagaatcattcccacaaactgtgttgtgatgtgttcgttcaactcacagagtttaacctttcttttcatagagcagttaggaaacactctgttggtaaattctgtaagtggatattctgacatcttgtggccttcgttggaaacgggatttcttcatattctgctacacagaagaattctcagtaacttccttgtgttgtgtgtattcaactcacagagttgaacgatcctttacacagagcagacttgaaacactctttttgtggaatttgcaagtggagatttcagccgttttgaggtcaatggtagaaaaggaaatatcttcgtataaagactagacagaatgattctaagaaaatcttttgtgatgtgtgcgttcaactcacagagtttaacttttcttctcatagagcagttaggaaacactctgtttgtaaagtgtgcaagtggatattcagacctctttgaggccttcgttggaaacgggatttcttcatattatgctagacagaagaattcccagtaacttccttgtgttgtgtgtgttcaactcacagagttgaactttcatttacacagagcagatttgaaacactctttttgtggaatttgcaaatggagatttcaagcgctttgaggccaaaggcagaaaaggaaatatcttcgtttcaaaactagacagaatcattctcagaaactgctctgcgatgtgttcgttcaactctcagagtttaacttttcttttcattcagcagtttggaaacactctgtttgtaaagtctgcacgtgcataatttgaccacttagaggccttcgttggaaacgggttttttttcatgtaaggctagacagaagaattcccagtaacttccttgcgttgtgtacattcaactcacagagttgaacgttcccttagacagagcagatttgaaacactctttttgtgcaattggcaagtggagatttcaagcgctttaaggtcaatggcagaaaaggaaatatcttcgtttcaaaactagacagaatcattcccaaaaactgcgttgtgatgtgttcgttcatctcacagagtttaacctttcttttcatagagcagttaggaaacagtctgtttgtaaattctgtaagtggatattctgacatcttgtggccttcgttggaaacgggatttcttcatattctgctagacagaagaattctcagtaacttccttgtgttgtgtgtattcaactcatagaggtgaacgatcctttacacagaacagacttgaaacactctttttgtggaatttgcaagtggagatttcagccgctttgagttcaatggttgaataggaaatatcttcctatagaaactagacagaatgattctcagaatctcctttgtgatgtgtgcgttcaactcacagagtttaacctttcttttcatagagcatttaggaaacactctgtttgtaaagtctgcaagtggatattcagacctccttgaggccttcgttggaaacgggatttcttcatattatgctagacagaagaattctcagtaacttccttttgttgtgtgtattcaactgacagagttgaaccttcccttagacagagcagatttgaaacactctttttgtggagtttgcaagtggagatttaaagcgctttgaggccaaaggcagaaaaggaaatatcttcgtataaaaactagacagaatcattctcagaaactgctgcgtgatgtgtgcgttcaactctcagagtttaacttttcttttcattcagcggtttggaaacactctgtgtgtaaagtctgcacgtggatattttgaccacttagaggccttcgttggaaacgggtttttttcatgtaaggctagacagaagaattcccagtaacttccttgtgttgtgtgcattcaactcacagagttgaacgttcccttagacagagcagatttgaaacactctatttgtgcaatttgcaagtgtagatttcaagcgctttaaggtcaacggcagaaaaggaaatatcttcgtttcaaaactagacagaatgattctcagaaactcctttgtgatgtgtgcgttcaactcacagagtttaacctttcttttcgtagagcaggtaggaaacactctgtttgtaaagtctgcaagtggatattcagacctctttgaggccttcgttggaaatgggatttcttcatattctgctagacagaataattctcagtaacttccttgtgttgtgtgtattcaactcacagatttgaacgatcctttacagagagcagacttgaaacactctttttgtcgaatttgcaagtggagatttcagccgctttgaggtcaatagtagaaaaggaaatatcttcgtagaaaaactagacagaatgattctcagaaactgctttgtgatgtgtgcgttcaactcacagagtttaacctttcttttcatagagcagttgggaaacactctgttggtaaagtctgcatgtggatattcagacatccttgaggctttcgttggaaacgggatttcttcatattctgctagaaagaagaattctcagtaacttccttgtgttgtgtgtgttcaactcacagagttgaactttcatttacacagagcagattggaaacactctttttgtggaatttgcaagtggagatttcaagcgctttgaggccaaaggcagaaaaggaaatatcttcgtataaaaactagacagagtcattctcagaaactgctctgtgatgtgtgcgttcaactgtcatagtttaacttttcttttcattcagcagtttggaaacactctgtttgtaaagtttgcacgtggacattgtgaccacttagaggcctttgttggaaacgggtttttttcatgaaaggctagacagaagaattcccagtaacttccttgtgttctgtgcactcaactcacagagatgaacgttcccttagacagagcagatttgaaacactctatttgtgcaatttgcaagtgtagatttcaagcgctttaaggtcaatggcagaaaaggaaatattttcgtttcaaaactagacagaatgattctcacaaactcctttgtgatgtgtgcgttcaactcacagagtttaacctttcttttcatagagcagttaggaaacactctgtttgtaaagtctgcaagtggatattcagacctctttgaggccttcgttggaaacgggatttcttcatattctgctagacagaagaattctcagtaacttccttgtgttgtgtttattcaactcacagagttgaatgatcctttacacagagcagacttgaaacactctttttgtggaatttgcaagtggagatttcagccgctttgaggtcaatggtagaaaaggaaatatcttcgtataaagactagacagaatgattctcagaaactcctttgtgatgtgtgcgttcaactcacagagtttaacctttcttttcatagagcagttaaaaacactctgtttgtaaagtctgcaagtggatattcagacctctttgaggccttcattggaaacgggtttttttcatataaggctagacagaagaattcccagtaacttccttgtgttgtgtgtgttcaactcacagagttgaactttcatttacacagagcagatttgaaacactctttttgtggaatttgcaaatggagatttcaagcgctttgaggccaaaggcagaaaaggaaatgtcttcgtttcaaaactagacagaatcattctcagaaactgctctgcgatgtgtgcgttcaactctcagagtttaacttttcttttcattcagcagtttggaaacactctgtttgtaaagtctgcacgtggataacttgaccagttagaggccttcgttggaaacgggtttttttcctgtaaggctagacagaagaattcccagtaacttccttgtgttgtgtgcattcaactcacagagttgaacgttcccttagacagagcagatttgaaacactctatttgtgcaatttgcaagtgtagttttcaagctctttaaggtcaacggcagaaaaggaaatatcttcgtttcaaaactagacagaatcattcccacaaactgcgttgtgatgtgttcgttcaactaacagagtttaacctttcttttcatagagcagttaggaaacagtctgtttgtcaattctgtaagtggatattctgacatcttgtggccttcgttggaaacgggatttcttcatattctactagacagaagaattcccagtaacttccttgtgttgtgtgtgttcaactcacagagttgaactttcatttacacagagcagatttgaaacactctttttgtggaatttgcaaatggagatttcagccgcgttgaggccaatggtagaaaaggaaatatcttcgtttcaaaactagacagaatgattctcagaaactcctttgtgatgtgtgcgttcaactcacacagtttaacctttcttttcatagagcagttaggaaacactctgtttgtaaagtctgcaagtggatattcagacctccttgaggccttcgttggaaacgggatttcttcatattctgctagaaagaaaaattctcagaatcttccttgtgttgtgtgtattcaactcacagagttgaacgatcctttacacagagcagatttgaaacactctttttgtggaatttgcaagtggagatttcaagcgctttgaggctaaaggcagaaaaggaaatatcttcgtataacaactagacagaatcattctcagaaactgctctgcgatgtgtgcgttcaactctcagagtttaacttttcttttcattcagcagtttggaaacactctgtttgtaaagtctgcacgtggatattttgaccatttagaggccttcgttggaaacgggtttttttcttgtaaggctagacagaagaattcccaggaacttccttgtgttgtgtacattcaactcacagagttgaacgttcccttagacagagcagatttgaaacactctttttgtgcaattggcaagtggtgatttcagcagctttgaggtcaatggtagaaaaagaaatatcttcgtataaaaactagacagaatcattcccacaaactgcgttgtgaggtgttcgttcaactcacagagtttaacctttcttttcatagagcagttaggaaacagtctgtttgtaaattctgtaagtggatattctgacatcttgtggccttcgttggaaacgggatttcttcatattctgctagacagaagaattctcagaaactttccttgtgttgtgtgtattcaactcacagagttgaacgatcgtttacacagagcagacttgagacactctttttgtggaatttgtaagtggagatttcagccgctttgaggtcaatggtagaaaaggaaatatcttcatatataaaccagacagaatgattctcagaaactcctttgtgatgtgtgtgttcaactcacagagtttaacctttcttttcatagaacagttagtaaacactctgtttttaaagtctgcaagtggatattcagacccctttgaggccttcgttggaaacgggatttcttcatattctgctagacagaagaattcccagtaacttccttgtgttgtgtgtgttcaactcacagagttgaactttcatttacacagagcagatttgaaacactctttttgtggaatttgcaaatggagatttcaagcgcttggaggccaaaggcagaaaaggaaatatcttcgtataaaaactagacagaatcattctcagaaactgctctgcgatgtgtgcgttcaactctcagagtttaacttttcttttcattcagcagtttggaaacactctgtttgtaaagtctgcacgtggataatttgaccacttacaggccttcgttggaaacgggtttttttcatgtaaggctagacagaagaattcccagtaacttccttgtgttgtgtacattcaactcacagagttgaacgttcccttaaacagagcagatttgaaacactctttttgtgcaattggcaagtggagatttcaagcgctttgaggtcaatggcagaaaaggaaatatcttcgtttcaaaactagacagaatgattctcagaaactcctttgtgatgtgtgcgttcaactcacagagtttaacctttcttttcatagagcagttaggaaacactctgtttgtaaagtcggcaagtggatattcagtcctcattgaggccttcgttggaaacgggatttcttcatattctgctagacagaagaattctcagtaacttccttgtgttgtgtgtattcaactcacagagttgaacgatcctttacacagagcagacttgaaacacactttttgtggattttgcaagtggagatttcagcctctttgagatcaatggtagaataggaaatatcttcctatagaaactagacagaatgattgtcagaaactcctttgtgatgtgtgcgttcaactcacagagtttaaccattcctttcatagagcagttaggaaacactctgtttgtaaagtctgcaagtggatattcagacatctttgaggccttcgttggaaacgggatttcttcatattctgctagacagaagaattctcagtaacttccttgtgttgtgtgtattcaactgacagagttgaactttcatttagagagagcagatttgaaacactgtttttgtggaatttgcaagtggtgacttcaagcgctttggggccaaacgcagaaaaggaaatatcttcgtataaaaactagacagaatcattctcagaaactgctctgcgatgtgtgcgttcaagtctcagagtttaacttttcttttcattcagcagtttggaaacactctgtttgtaaagtctgcacgtggatattttgaccacttagaggccttcgttggaaacgggtttttttcctgtaaggctagacagaagaattcgcagtaacttccttgtgttgtgtacattcaactcacagagttgaacgttcccttagacagagcagatttgaaacactctttttgtgcaattggcaagtggagatttcaagcgctttaaggtcaatggcagaaaaggaaatatcttcgtttcaaaactagacagaatgattcccagaaaatcctttgtgatgtgtgcgttcaactcacagagtttaacttttcttttcatagaacagttaggaaacactctgtttgtaaagtctgcaagtggatattcagacctctttgaggccttcgttggaaacgggatttcttcatattatgctataaagaagaattctcagtaactttccttgtgttgtgtgtattcaactcacagagttgaacgatcctttacagagagcagacttgaaacactctttttgtggaatttgcaagtggagatttcagccgctttgaggtcaatggtagaataggaaatatcttccaatagaaactagacagaatgattctcagaaacttctttgtgatgtgtgcgttcaactcacacagtttaacctttcttttcatagagcagttaggaaacactctgtttgtaaagtctgcaagtggatattcacacctccttgaggccttcgttggaaacgggatttcttcatattatgctagacagaagaattcccagtaacttccttgtgttgtgtgtgttcaactcacagagttgaactttcatttacacagagcagatttgaaacactctttttgtggaatttcaagtggagatttcaagcgctttgaggccaaaggcagaaaaggaaatatcttcgtataaaaactagacagaatgattctcagaaactcctttgtgatgtgtgcgttcaactcacagagtttaacctttcttttcattcaccagtttggaaacactctgtttgtaaagtctgcacgtggatattttgaccacttagaggccttcgttggaaacgggtttttttcctgtaaggctagacagaagaattcccagtaacttccttgtgttgtgtgcaatcaaatcacagagttgaacgttcccttagacagagtagatttgaaacactctatttgtgcaatttgcaagtgtagatttcaagcgctttaaggtcaaaggcagaaaaggaaatatcttcgtttcaaaactagacagaatcattcccacaaactgcgttgtgatgtgttcgttcaactcacagcagtttaacctttcttttcatagagcagttaggaaacagtctgtttgtaaattctgtaagtggatattctgacatcttgtggccttcgttggaaaagggatttcttcatattctgctagacagaataattctcagtaacttccttgtgttgtgtgcattcaactcacagagttgaacgatcctttacagagagcagacttgaaacactctttttgtggaatttgcaagtggagatttcagccgctttgaggtcaatggtagaataggaaatatcttcctacagaaactagacagaatgattctcataaactcctttgtgatgtgtgcgttcaactcacagagtttaacctttcttttcatagagcagttaggaaacactctgtttgtaaagtctgcaagtggatattcagacctctttgaggccttcgttggaaacgggatttcttcatattctgctagacagaagaattctcagtaacttccttgtgttgtgtgtattcaactcacagagttgaacgatcctttacacagagcatacttgaaacactctttttgtggaatttgcaagtggagatttcagccgctttgaggtcaattgtagaaaaggaaatatcttcgtagaaaaactagacagaatcattctcagaaagtgctctgcgatgtgtgcgttcaactctcagagtttaactttgcttttcattcagcagtttggaaacactctgtttgtaaagtctgcacgtggataatttgaccacttagaggccttcgttggaaacgggtttttttcatgtaaggctagacagaagaattcccagtaacttccttgtgttgtgtgcattcaactcacagagttgaacgttccctagacggagcagatttgaaacactctatttgtgcaatttgcaagtgtagatttcaagcgctttaaggtcaatggcagaaaaggaaatatcttcgtttcaaaactagacagaatcattcccacaaactgcgttgtgatgtgttcgttcatctcacagagtttaacctttcttttcgtagagcagttaggaaacagtctgtttgtaaattctgtaagtggatattctgacatcttgtggccttcgttggaaacgggatttcttcatattgctgctagacagaagaattctcagtaacttccttgtgttgtctgtattcaactcacagagttgaacgatcctttacacagagcagacttgaaacacactttttgtggaatttgcaagtggagatttcagccgctttgaggtcaatggtagaataggaaatatcttcctatagaaactagacagaatgattctcagaaactcctttgtgatgtgtacgttcaactcacagagtttaacctttcttttcatagagcagttaggaaacactctgtttgtaaagtctgcaagtggatattccgacatccttgaggctttcgttggaaacgggatttcttcatattctgctagaaagaagaattcccagtaacttccttgtgttgtgtgtgttcaactcacagagttgaactttcatttacacacagcagatttgaaacactctttttgtggaatttgcaaatggagatttcaagcgctttgaggccaaaggcagaaaaggaaatatcttcgtataaaaactagacagaatcattctcagaaactgctctgcgatgtgtgcgttcaactctcagagtttaactttgcttttcattcagcagtttggaaacactctgtttgtaaagtctgcacgtggataatttgaccacttagaggccttcgttggaaacgggtttttttcatgtaaggctagacagaagaattcccagcaacttccttgtgttgtgtgcattcaactcacagagttgaacgttcccttagacagagcagatttgaaacactctatttgtgcaatttgcaagtgtagatttcaagccctttaaggtcaatggcagaaaaggaaatatcttcgtttcaaaactagacagaatcattctcagaaactgctctgcgatgtgtgcgttcaactctccgagtttaacttttcttttcattcagcagtttggaaacactctgtttgtaaagtctgcacgtggataatttgaccacttagaggccttcgttggaaacggttttttttcatgtaaggctagacagaagaattctcagtaacttccttgtgttgtgtgtattcaactcacagagttgaacgatcctttacacagaccagacttgtaacactctttttgtggaatttgcaagtggagatttcagccgctttgaagtcaaaggtagaaaaggaaatatcttcgtataaaaactagacagaatgattctcagaaactcctttgtgatgtgtgtgttcaactcacagagtttaacctttcttttcatagagcagttagtaaacactctgtttgtacagtctgaaagtggatattcagacccctttgaggccttcgttggaaaagggatttcttcatattatgctagacagaagaattcccagtaacttccttgtgttgtgtgtgttcaactcacagagttgaactttcatttacacagagcagatttgaaacactctttttgtggaatttgcaagtggagatttcaagcgctttgaggccaaaggcagaaaaggaaatatcttcgtttgaaaactagacagaaatgattctcagaaactcctttgtgatgtgtgcgttcaactcacagagtttaacctttcttttcatggagctgttaggaaacactctgtttgtaaagtctgcaagtggatattcagacctctttgaggccttcgttggaaacgggtttttttcatataaggctagacagaagaattcccagtaacttccttgtgttgtgtacattcaactcacagagttgaacgttcccttagacagagcagatttgaaatactctttttgtgcaattggcaagtggagatttcaagcgctttaaggtcaatggcagaaaaggaaatatcttcgtttcaaaactagacagaatcattcccacaaactgcgttgtgatgtgttcgttcaactcacagagtttaacctttcttttcatagagcagttaggaaacactctgtttgtaaattctgtaagttgatattctgacatcttgtggccttcgttggaaactggatttcttcatattctgctagacagaagaattctcagaatctttccttgtgttgtgtgtattcaactcacagagttgaacgatggtttacacagagcagatttgaaacactctttttgtggaatttgcaagtggagatttcagccgctttgaggtcaatggtagaaaaggaaatatcttcgtataaaaactagacagaatgattctcagaaactcctttgtgatgtgtgcgttcacctcacagagtttaacctttcttttcatagagcagttaggaaacactctgtttgtaaagtctgcaagtggatattcagacctctttgaggccttcgttggaaacgggatttcttcatattatgctagacagaagaattcccagtaacttcccttgtgttgtgtgtattcaactcacagagttgaactttcatttacacagagcagatttgaaacactctttttgtggaatttgcaaatggagatttcaagcgctttgaggccaaaggcagaaaaggaaatatcttcggtataaaaactagacagaatcattctcagaaactgctctgtgatgtgtgcgttcaactctcagagtttaacttttcttttcattcagcagtttggaaacactctgtttgtaaagtctgcacgtggataatttgaccacttagaggccttcattggaaacgggtttttttcatgtaaggctagacagaagaattcccagtaacttccttgtgttgtgtacattcaactcacagagttgaacgttcccttagacagagcagatttgaaacactctttttgtgcaattggcaagtggagatttcaagcgctttaaggtcaatggcagaaaaggaaatatcttcgtttcaaaactagacagaatgattctcagaaactcctttgtgatgtgtgcgttcaactcacagagtttaaactttcttttcatagaggagttaggaaacactctgtttgtaaagtctgcaagcggatattcagacctctttgaagccttcgttggaaacgggatttcttcatattctgctagacagaagaattctcagtaacttccttgtgttgtgtgtattcaactcacagagatgaacgatcctttacacagagcagacttgaaacactccttttgtggaatttgcaagtggagatttcagccgctttgaggtcaatggtagaaaaggaaactatcttcgtataaagactagacagaatgattctcagaaactcctttgtgatgtgtgtgttcaactcacagagtttaacctttcttttcatagagcagttaggaaacactctgtttgtaaagtctgtaagtggatattcagacctctttgaggccttcgttggaaacgggtttttttcatataaggctagacagaagaattcccagtaacttccttgtgttgtgtgtgttcaactcacagagttgaactttcatttacacagagcagatttgaaacactctttttgtggaatttgcaaatggagatttcaagcgctttgaggccaaaggcagaaaaggaaatatcttcgtataaaaacttgacagaatcattctaagaaactgctctgtgatgtgtgtgttcaactctcagagtttaacttttcttttccttcagcagtttggaaacactctgtttgtaaagtctgcacgtggataatttgaccacttagaggccttcgttggaaacgggtttttttcatgtaaggctagacagaagaattcccagtaacttccttgtgttgtgtacattcaactcacagagttgaacgttcccttaaacagagcagatttgaaacactctttttgtgcaattggcaaatggagatttcaagggctttaaggtcaatggcagaaaaggaaatatcttcgtttcaaaactagacagaacgattctcagaaactcctttgtgatgtgtgcgttcaactcacagagtttaacctttcttttcatagagcagttaggaaacactctgtttgtaaagtctgcaagtggatattcagacctctttgaggccttcgttggaaacgggatttcttcattttctgctagacagaagaattctcagtaacttccttgtgttgtgtgtattcaactcacagagttgaacgatcctttacacagagcagacttgaaacactctttttgtggaatttgcaagtggagatttcagccgctttgtggtcaacggtagaaaaggaaatatcttcgtataaagactagacagaatgattctcagaaactcctttgtgatgtgtgtgttcaactcacagagtttaacctttcttttcatagagcagttagtaaacactctgtttataaagtctgcaagtggatattcagacccctttgaggccttcgttggaaacgggatttcttcatcttatgctagacagaagaattctcagtaacttccttgtgttgtgtgtattcaactgacagagttgaactttcatttagacagagcagatttgaaacactctttttgtggaatttgcaagtggagatttcaagcgctttgaggccaaaggcagaaaaggaaatatctttgtataaaaactagatagaatcattctcagaaactgctctgcgatgtgtgcgttcaactctcagagtttaacttttcttttcattcagcagtttggaaacactctgtttataaagtctgcacgtggatattttgaccacttagaggccttcgttggaaacgggtttttttcctgtaaggctagacagaataattcccagtaacttccttgtgttgtgtacattcaactcacagagttgaacgtacccttagacagagcagatttgaaacactctttttgtgcaattggcaagtggagatttcaagcgctttaaggtcaatggcagaaaaggaaatttcttcgtttcaaaactaaacagaatcattcccacaaactgcgttgtgatgtgttcgttcaactcacagagtttaacctttcttttcatagagcagttaggaaacagtctgtttgtaaattctgtaagtggatattctgacatcttgtggccttcgttggaaacgggatttcttcatattctgctagacagaagaattctcagtaacttccttgtgttgtgtgtattcaactcacagagttgaacgatcctttacacagagcagacttaaaacactctttttgtggaatttgcaagtggagatttcagccgctttgaggtcaatagtagaaaaggaaatatcttcgtagaaaaactagacagaatgattctcagaatctcctttgtgatgtgtgcgttcaactcacagagtttaacctttcttttcatagagcagttaggaaacactctgtttgtaaagtctgcaagtggatattcagacctctttgtggccttcgttggaaacgggtttttttcatataaggctagacagaagaattttcagtaacttccttgtgttgtgtgtattcaactcacagagttgaacgatcctttacagagagcagacttgaaacactctttttgtggaatttgcaagtggagatttcagccgctttgaggtcaatggtggaataggaaatatcttcctatagaaactagacagaatcattctcagaatctgcagcgtgatgtctgcgttcaactctcagagtttaacttttcttttcattcagcggtttggaaacactctgtttgtaaagtctgcacgtggatattttgaccacttagaggccttcgttggaaacgggtttttttcatgtaaggctagacagaagaattcccagtaacttccttgtgttgtgtacattcaactcacagagttgaacgttcccttagacagagcagatttgaaacactctttttgtgcaattggcaaatggagatttcaagcgctttaaggtcaatggcagaaaaggaaatatcttcgtttcaaaactagacagaatcattcccacaaactgcgttgtgatgtgttcgttcatctcacagagtttaacctttcttttcatagagcagttaggaaacagtctgtttgaaaattctgtaagtggatattctgacatcttgtggccttcgttggaaacgggatttcttcatattctgctagacagaagaatactgagtaacttccgcgtgttgtgtgtattcaactcacagagttgaacgatcctttacacagagcagacttgaaacactctttttgtggaatttgcaagtggagatttcagccgctttgaggtcaatggtagaaaaggaaatatcttcatataaaaactagacagaatgattctcagaaactcctttgtgatgtgtgcgttcaactcacagagtttaacttttcttttcaaagagcagttaggaaacactctctttgtaaagtctgcaagtggatattcagacctctttgaggccttcgttggaaacgggatttcttcatattctgctagacagaagaattcccagtaacttccttgtgttgtgtgtgttcaactcacagagtggaactttcatttacacagagcagatttgaaacactctttttgtggaatttgcaagtggagatttcaagcgctttgaggccaaaggcagaaaaggaaatatcttcgtttcaaaactagacagaatcattctcagaaactgctgcgtgatgtgtgcgatcaactctcagagtttaacttttcttttcattcagcggtttggaaacactctgtttgtaaagtctgcacgtggatattttgaccacttagaggccttcgttggaaacgggttttattcatgtaaggctagacagaagaattcccagtaacttccttgtgttgtgtgcattcaactcacagagttgaacgttcccttagacagagcagatttgaaacactctatttgtgcaatttgcaagtgtagatttcaagcgctttaaggtcaatggcagaaaaggaaatttcttcgtttcaaaactagacagaatcattcccacaaactgcgttgtgaagtgctcgttcaactcacagattttaacctttctgttcatagagcagttaggaaacactctgtttgtaaagtctgcaagtggatattctgacatcttgcggccttcgttggaaacggaatttcttcatattctgctagacagaagaattctcagtaacttccttgtgttgtgtgtattcaactcacagagttgaacgatcctttacacagagcagacttgtaacactctttttgtggaatttgcaagtggagatttcagccgatttgaagtcaaaggtagaaaaggaaatatcttcctataaaaactagacagaatgattctcagaaactcctttgtgatgtgtgcgttcaactcacagagttcaacctttcttttcatagagcagttgggaaacactctgtttgtaaagtctgcaagtggatattcagacttctttgaggccttcgttggaagcgggatttcttcatgttctagacagaagaattctcagtaacttccttgtgttgtgtgtattcaactgacagagttgaaatttcatttagagggagcagatttgaaacactgtttttgtggaatttgcaagtggagatttcaaacgctttggggccaaaggcagaaaaggaaacatcttcgtataaaaactagacagaatcattctcagaaactgctctgcgatgtgtgcgttaaactctcagagtttaacttttcttttcattcagcagtttggaaacactctgtttgtaaagtctgcacgtggatattttgaccacttagaggccttcgttggaaacgggtttttttcctgtaaggctagacagtagaattcccagtaacttccctgtgttgtgtgcattcaactcacagagttgaacgttcccttagacagagcagatttgaaacactctatttgtgcaatttgcaagtgtagatttcaagcgctttaaggtcaatggcagaaaaggaaatatcttcctttcaaaactagacagaatcattcccacaaactgcgttgtgatgtgttcattcaactcacagagtttaacctttcttttcatagagcagttaggaaacagtctgtttgtcaattctgtaagtggatattctgacatcttgtggccttcgttggaaacgggatttcttcatattctgctagacagaagaattctcagtaacttccttgtgttgtgtgtattcaactcacagagttgaacgatcctttacacagagcagacttgaaacactctttttgtggaatttgcaagtggagatttcagccgctttgaggtcaatggtagaaaaggaaactatcttcatatagagactagacagaatgattctcagaaaatcttttgtgatgtgtgcgttcaactcacagagtttaacttttcttctcatagagcagttaggaaccactctgtttgtaaagtctgcaagtggatattcagacctctttgaggccttcgttggaaacttgatttcttcatattatgctagacagaagaattcccagtaacttccttgtgttgtgtgtgttcaactcacagagttgaactttcatttacacagagcagatttgaaactctctttttgtggaatttgcaagtggagatttcaagcgctttgaggccaaaggcagaaaaggaaatatcttcgtttcaaaaccagacagaatcattctcagaagctgctgcgtgatgtgtgcgttcaactctcagagtttaacttttcttttcattcagcggtttggaaacactctgtttgtgaagtctgcacgtggatattttgaccacttagaggccttcgttggaaacggtttttttgcatgtaaggctagacagaagagttcccagtaacttccttgtgttgtgtacattcaactcacagagttgaacgttcccttagacagagcagatttgaaacactctttttgtgcaattggcaagtggagatttcaagcgctttaaggtcaatggcagaaaaggaaatatcttcgtttcaaaactagagagaatcattcccacaaactgcgttgtgatgtgtttgttcaactcacagagtttaacctttcttttcatagagcagttaggaaacagtctgtttgtcaattctgtaagtggatattctgacatcttgtggccttagttggaaacgggatttcttcatattctgctagacagaagaattctcagtaactttccttgtgttgtgtgtattcaactcacagagttgaacgatcctttacacagagcagacttgaaacactctttttggggaatttgcaagtggagatttcagccgctttgaggtcaatggtagaaaaggaaactatcttcatataaagactagacagaatgattctcataaactcctttgtgatgtgtgcgttcatctcacagagtttaacttttattttcatagagcagttaggaaacactctgtttgtaaagtctgcaagtggatattcagacctccttgaggccttcgttggaaacgggatttcttcatattctgctagacagaagaattctcagtaacttccttgtgttgtgtgtattcaactcacagagttgaacgatcctttacacagagcagacttgaaacactctttttgtggaatttgcaagtggagatttcagccgctttgaggtcaatggtagaaaaggaattatcttcgtataaagactagacagaatgattctcagaatctcctttgtgatgtgtgcgttcaactcacagagtttaacctttcttttcatagagcagttaggaaacactctgtttgtaaagtctgcaagtggatattcagacctctttgatgccttcgttggaaacgggtttttttcatataaggctagacagaagaattcccagtaacttccttgtgttgtgtgcattcaactcacagagttgaacgttcccttagacagagcagatttgaaacactctatttgtgcaatttgcaagtgtagatttcaagcgctttaaggtcaacggcagaaaaggaaatatcttcgtttcaaaactagacagaatgattctcagaaactcctttgtgatgtgtgcgttcaactcacagagttcaacctttcttttcatagagcagttaggaaacactttgtttgtaaagtctgcaagtggatattcagacttctttgaggccttcgttggaagcgggatttcttcatgttctgctagacagaagaattcctcagtaacttcccttgtgttgtgtgtattcaactcgcagagttgaacgatcctttacacagagcagacttgaaacactctttttgtggaatttgcaagtggagatttcagccgctttgaggtcaatagtagaaaaggaaatatcttcgtagaaaaactagacagaatgattctcataaactcctttgtgatgtgtgcgttcaactcacagagtttaacttttgttttcatagagcagttaggaaacactctgtttgtaaagtctgcaagtggatattcagacctctttgaggccttcggtggaaacgggatttcttcatattctgctagacagaagaattcccagtaacttccttgtgttgtgtgttttttaactcacagagttgaactttcatttacacagagcagatttgaaacactctttttgtggaatttgcaagtggagatttcaagcgctttgaggccaaaggcagaaaaggaaatatcttcgtataaaaactagacagaatcattctcagaaactgctgcgtgatgtgtgcgttcaactctcagagtttaacttttcttttcattcagcggtttggaaacactctgtttgtaaagtctgcacgtggatattttgaccacttagaggccttcgttggaaacgggtttttttcatgtaaggctagacagaataattctcagtaacttgcttttgttgtgtgtattcaactcacagagttgaacgatcctttacagagagcagacttgaaacactctttttgtggaatttgcaagtggagatttcagccgctttgaggtcaatggtagaataggaaatatcttcctatagaaactagacagaatgattctcataaactactttgtgatgtgtgcgttcaacacacagagtttaaactttctgttcatagagcagttaggaaacactctgtttgtaaagtctgtaagtggatattctgacatcttgtggccttcgttggaaacgggatttcttcatattctgctagacagaagaattctcagtgacttccttgtgttgtgtgtattcaactcacagagttgaacgatcctttacacagagcagtcttgaaacactctttttgtggaatttgcaagtggagatttctgccgctttgaggtcaatggtagaataggaaatatcttcctatagaaactagacagaatgattctcagaaactcctttgtgatgtgtgcgttcagctcacagagttcaacctttcttttcatagagcagttgggaaacactctgtttgtaaagtctgcaagtggatattcagacttctttgaggccttcgttggaagcgggatttcttcatgttctgctagacagaagaattcccagtaacttccttgtgttgtgtgtgttcaactcacagagctgaactttcatttacacagagcagatttgaaacactctttttgtggaatttgcaaatggagatttcaagcgctttgaggccaaaggcagaaaaggaaatatcttcgtataaaaactagacagaatcattctcagaaactgctctccgatgtgtgcattcagctctcagagtttaacttttcttttcattcaccagtttggaaacactctgtttgtaaagtctgcacgtggatattttgaccacttagaggccttcgttggaagcgggcttttgtcatgtaaggttagacagaatatttcccagtaacttccttgtgttgtgtacattcaactcacagagttcaacgttcccttagacagagcagatttgaaacactctttttgtgaaattggcaagtggagatttcaagcgcttaatgtcaatggcagaaaaggaaatatcttcgtttcaaaaccagacagaatcattcccacaaactgcgttgtgatgtgttcgttcaactcacagagtttaacctttcttttcatagagcagttaggaaaaactctgtttgtaaattctgtaagtggatattctgacatcttgtggccttctttggaaacgagatttcttcatattctgctagacagaagaattctcagtaacttccttgagttgtgtgtattcaactcacagagttgaacgatcctttacacagagcagacttgaaacactctttttgtggaatttgcaactggagatttcagccgcgttgaggtcaatggtagaaaaggaaatatcttcgtataaaaactagacagaatgattctcagaaagtcctttgtgatgtgtgcgttcaactcacagagtttaccctttctgttcatagagcagttaggaaacactctgtttgtaaattctgcaagtggatattcagacctacttgaggtcttcggtggaaacgggatttcttcatattctgctagacagaagagattcccagtaacttcattgtgttgtgtgtgttcaactcacagagttgaactttcatttacacagagcagatttgaaacactctttttgtggaatttgcaaatggagatttcaagcgctttgaggccaaaggcagaaaaggaaatatcttcgtataaaaactagacagaatcattctcagaaactgctgcgtgatgtgtgcgttcaactctcagagtttaacttttcttttcattcagcggtttggaaacactctgtttgtaaagtctgcacgtggatattttgaccacttagaggccttcgttggaaacgggattttttcatgtaaggctagacagaagaattcccagtaacttccttgtgttgtgtgcattcaactcacagagttgaacgttcccttagacagagcagatttgaaacactctatttgtgcaatttgcaattgtagatttcaagcgttttaaggtcaatggcagaaaaggaaatatcttcgtttcaaaactagacagaatgattctcagaaacttctttgtgatgtttgcgttcaactcacagagtttaacctttcttttcatagagcagttaggaaacactctgtttgtaaactctgcaagtggatattcagacctctttgaggccttcgttggaaacgggatttcttcatactatgctagacagaagaattctcagtaacttccttgggttgtgtgtattcaactcacagagttgaacgatcctttacacagagcagacttgaaacactctttttgtggaatttgcaagtggagatttcagccgctttgaggtcaatggtagaaaaggaaatatcttcgtataaagactagacagagtgattctcagaaactcctttgtgatgtgtgtgttcaactcacagagtttaacctttcttttcaagagcagttagtaaacactctgtttataaagtctgcaagtggatattccgacccctttgagtccttcgttggaaacgggatttcttcatattatgctagacagaagaattcccagtaacttccttgtgttgtgtgtgttcaactcacagagttgaactttcatttgcacagagcagatttgaaacactctttttgtggaatttgcaagtggagatttcaagcgctttgaggccaaaggcagaaaaggaaatatctccgtttcaaaactagacagaatcattctcagaaactgctgcttgatgtgtgcgttcaactctcagagtttaacttttcttttcattcagcggtttggaaacactctgtttgtaaagtctgcacgtggacattttgaccacttagaggccttcgttggaaacgggtttttttcatgtaaggctagacagaagaattcccagtaacttccttgtgttgtatgcattcaactcacagagttgaacgttcccttagacagagcagatttgaaacaatctatttgtgcaatttgcaagtgtagatttcaagcgctttaaggtcaatggcagaaaaggaaatatcttcgtttcaaaactagacagaatcattcccacaaactgcgttgtgatgtgttcgttcaactcacagagtttaacctttctgttcatagagcagttaggaaacactctgtaaagtctgtaagtggatattctgacatcttgtggccttcgttgtaaacgggatttcttcatattctgctagacagaagaattctcagtaacttccttgtgttgtgtttattcaactcacagagttgaatgatcctttacacagagtagacttgaaacactctttttgtggaatttgcaagtggagatttcagccgctttgaggtcaatggtagaaaagtaaatatcttcctataaagactagacagaatgattctcagaaactcctttgtgatgtgtgcgttcaactcacagagtttaacctttctgttcatagagccgttaggaaacactctgtttgtaaagtctgcaagtggatattcagacctctttgaggccttcgttggaaacgggatttcttcatattatgctagacagaagaattctcagtaacttccttgtgttgtgtgtattcaactgacagagttgaactttcatttagagagagcagatttgaaacactgtttttgtgggatttgcaagtggagatttcaagcgctttggggccaaaggcagaaaaggaaatatcttcgtataaaaactagacagaatcattctcagaaactgctgcgtgatgtgtgcgttcaactctcagagtttaacttttcttttcattcagcggtttggaaacactctgtttgtaaagtctgcacgtggaaattttgaccacttagaggccttcgttggaaacgggtttttttcatgtaaggctagacagaagaattcccagtaacttccttgtgttgtgtgcattcaacttacagagttgaacgttcccttagacagagcagatttgaaacactctatttgtgcaatttgcaattgtagatttcaagcgctttaaggtcaagggcagaaaaggaaatatcttcgtttcaaaactagacagaatcattcccacaaactgcgttgtgatgtgttcgttcaactcacagagtataacctttctgttcatagagcagttaggaaacactctgtttgtaaagtctgtaagtggatattctgacatcttgtggccttcgttggaaacgggatttattcatattctgctagacagaagaattctcagtaacttccttgtgttgtgtgtattcaactcacagagttgaacgatcctttacacagagcagtcttgaaacactctttttgtggaatttgcaagtggagatttctgctgctttgaggtcaatggtagaataggaaatatcttcctatagaaactagacagaatgattctcagaaactcctttgtgatgtgggcgttcaactcacagagtttaacctttcttttcatagagcagttaggaaacactctgtttgtaaagtctacacgtggatatttggacttctttgaggccttcgttggaaacgggtttttttcatgtaaggctagacggaaagaattctcagtaacttccttgtgttgtgtgtattcaactgacagagttgaactttcatttagagagagcagatttgaaacactgtttttgtggaatttgcaagtggagatttcaagcgctttggggccaaaggcagaaaaggaaatatcttcgtataaaaactagacagatcattctcagaaactgctgtgtgatgtgtgcgttcaactctcagagtttaacttttcttttcattcagcggtttggaaacactctgtttgtaaagtctgcacgtggatattttgaccacttagaggccttcgttggaaacgggtttttttcatgtaaggctagacagaagaattcccagtaacttccttgtgttgtgtacattcaactcacagagttgaacgttcccttagacagagcagatttgaaacactctttttgtgcaattgacaagtggagatttcaagcgctttaaggtcaatggcagaaaaggaaatatcttcgtttcaaaactagacagaatcattcccacaaactgcgttgtgatgtgttcgttcaactcacagagtttaacctttcttttcatagagcagttaggaaacagtctctttgaaaattctgtaagtggatattctgacatcttgtggccttcgttggaaacgggatttcttcatattctgctagacagaagaattctcagaaacttccttgtgttgtgtgttttcaactcacagagttgaacgatcctttacacagagcagacttgaaacactccttttgtggaatttgcaagtggagatttcagccgctttgaagtcaatggtagaataggaaatatcttcctatagaaagtagacagaatgattctcagaaactcctttgtgatgtatgcgttcaactcacagagtttaacctttcttttcatagagcagttaggaaacactctgtttgtaaagtctgcaagtggatattcagacctccttgaggccttcgttggaaacgggtttttttcatgtaaggctagacagaagaattcccagtaacttccttgtgttgtgtgtgttcaactcacagagttgaactttcatttacacagagcagatttgaaacactctttttgtggaatttgcaaatggagatttcaagcgctttgtggccaaaggcagaaaaggaaatatcttcgtataaaaactagacagaatcattctcagaaactgctgcgtgatgtgtgcgttcaactctcagagtttaacttttcttttcattcagcggtttggaaaaactctgtttgtatagactgcacgtggatattttgaccacttagaggccttcgttggaaacgggttttttttcatgtaaggctagacagaagaattcccagtaacttccttgtgttgtgtgcattcaactcacagagttgaacgttcccttagacagagcagatttgaaacactctatttgtgcaatttgcaagtgtagatttcaggcgctttaaggtcaacggcagaaaaggaaatatcttcgtttcaaaactagacagaatgattctcagaaactcctttgtgatgtgtgcgttcaactcacagagtttaacctttctgttcaaagagctgttaggaaacactctgtttgtaaagtctgcaagtggatattcagacctccttcaggccttcgttggaaacgggatttcttcatattctgctagacagaagaattctcagtaacttccttgtgttgtgtgttttcaactcacagagttgaacgatcctttacacagagcagacttgaaacactctttttgtggaatttgcaagtggagatttcagccgctttgagctcaatggtagaataggaaatatcttcctatagaaactagacagaatgattctcagaaactcctttgtgatgtgtgcgttcaactcacagagtttaacctttcttttcatagagcagttaggaaacactctgtttgtaaagtctgcaagtagatattcagacatctttgaggccttcgttggaaacgggatttcttcatgttctgctagacagaagaattctcagaaacttccttgtgttgtgtgttttcaactcacagagttgaacgatgctttacacagagtagacttgaaacactctttttgtgtaatttgcaagtggagatttcagccgctttgaggtcaatggtagaaaaggaaatatcttcgaataaaaactagacagaatcattctcagaaactgctgcgtgatgtgtgcgttcaactctcagagtttaacttttcttttcattcagcggtttggaaacactctgtttgtaaagtctgcacgtggatattttgaccacttagaggccttcgttggaaacgggttttttcatgtaaggctagacagaagaattcccagtaacttccttgtgttgtgtgcattcaactcacagagttgaacagttcccttagacagagcagatttgaaacactctatttgtgcaatttgcaagtgtagatttcaagcgctttaaggtcaatggcagaaaaggaaatatcttcgtttcaaaacttgacagaatgattctcagaaactcctttgtgatgtgtgcgttcaactcacagagtttaacctttcttttcatagagcagttaggaagcactctgttagtaaagtctgcaagtggatattcagacctccttgaggccttcgttggaaaggggatttcttcatattatgctagacagaagaattctcagtaacttccttgtgttgtgtgtattcaactcacagagttgaacgatcctttacacagagcagacttgaaacactctttttgtgaaatttgcaagtggagatttcagccgctttgaggtcaatggtagaataggaaatatcttcctatagaaactagacagaatgattctcagaaactcctttgtgatgtgtgcgttcaactcacagagtttaacctttcttttcatagagcagttaggaaacactctgttggtaaagtctgcaagtggatattcagacctctttgaggccttctttggaaacgggatttcttcatattctgctagacagaagaattcccagtaacttccttgtgttgtgtgtgttcaactcacagagttgaactttcatttacacagagcagatttgaaacactctttttgtataatttgcaaatggagatttcaagcgctttgaggccaaaggcagaaaaggaaatatgcttacttataaaaactagacagaatcattctcagaaactgctctgcgatgtgtgcgttcaactctcagagtttaacttttcttttcattcagcagtttggaaacactctgtttgtaaagtctgcacgtggataacttgaccacttagaggccttcgttggaaacgggattttttcatgtaaggctagacagaagaattctcagtaacttccttgtgttgtgtgtattcaactcacagaattgaacgatcctttacacagagcagacttgtaacactctttttgtggaatttgcaagtggagatttcagccgctttgaagtcaaaggtagaaaagtaaatatcttcctataaaaactagacagaatgattctcagaaaatcctttgtgatgtgtgcgttcaactcacagagtttaacatttcttttcatagagcagttaggaaacactctgtttgtaaagtctgcaagtggatattcagacctctttgaggccttctttggaaacgggatttcttcatattctgctagacagaagaattctcagtaacttccttgtgttgtgtgtattcaactcacagagtggaacgatcctttacacagagcagacttgaaacactctttttgtggaatttgcaagtggagatttcagccgctttgaggtcaatagtggaaaaggaaatatcttcgtagaaaaactagacagaatgattctcagaaactcctttgtgatgtgtgtgttcaactcacagagtttaacctttcttttcatagagcagttagtaaacactctgtttataatgtctgcaagtggatattcagacccctttgaggccttcgttggaaacgggatttcttcatattctgctagacagaagaattcccagtaacttccttgtgttgtgtggattcaactcacagagttgaactttcatttacacagagcagatttgaaacactctttttgtggaatttgcaaatggagatttcaagccctttcaggccaaaggcagaaaaggaaatatcttcgtataaaaactagacagaatcattctcagaaactgctctgcgatgtgtgcgttcaactctccgagtttaacttttcttttcattcagcagtttggaaacactctgtttgtaaagtctgcacgtggataatttgaccacttagaggccttctttggaaacggtttttttttcatgtaaggctagacagaagaattcccagtaacttccttgtgttgtgtgcattcaactcacagagttgaacgttccctagacggagcagatttgaaacactctatttgtgcaatttgcaagtgtagatttcaagcgctttaaggtcaatggcagaaaagggaatatcttcgtttcaaaactagacagaatcattcccacaaactgcgttgtgatgtgtgcgttcaactcacagagtttaacttttcttttcatagagcagttaggaaacactctgtttgtaaagtctgcaagtggatattcagacctctttgaggccttcgttggaaacgggatttcttcatattctgctagacagaagattctcagtaacttccttgtgttgtgtgtattcaactcacagagttgaacgatcctttacacagagcagacttgaaacactctttttgtggaatttgcaagtggagatttcagccgctttgaggtcaatagtagaaaaggaaatatcttcgtagaaaaactagacagaatgattctcagaaactcctttgtgatgtgtgcgttcaacacacagagtttaacttttcttttcatagagcagttagtaaacactctgtttataacgtctgcaagtggatattcagacccctttgaggccttcgttggaaacgggatttcttcatattatgctagacagaagaattcccagtaacttccttgtgttgtgtgtgttcaactcacagagttgaactttcatttacacagagcagatttgaaacactctttttgtggaatttgcaagtggagatttcaagcgctttgaggccaaaggcagaaaaggaaatatcttcgtaaaaaaatagacagaatcattctcagaaactgctctgcaatgtgtgcgttcaactctcagagtttaacttttcttttcattcagcagtttggaaacactctgtttgtaaagtctgcacgtggataacttgaccacttagaggccttcgttggaaacgggtttttttcatgtaaggctagacagaagaattcccagtaacttccttgtgttgtgtgcattcaactcacagagttgaacgttcccttggacagagcagatttgaaacactctatttgtgcaatttgcaagtgtagatttcaagcgcattaaggtcaatggcagaaaaggaaatatcttcgtttcaaaactagacagaatgattctgagaaactcctttgtgatgtgtgcgttcaactcacacagtttaacctttcttttcatagagcagttaggaaacactctgtttgtaaagtctgcaagtggatattcagacttctttgaggccttcgttggaagcgggatttcttcatattctgctagacagaagaattctcagtaacttccttgtgttgtgtgtattcaactcacagaggtgaacgatcctttacacagagcagacttgaaacactctttttgtggaattgcaagtggagatttcagccgctttgaggtcaatggtagaaaaggaaatatcttcgtataaagactagacagaatgattctaagaaaatcttttgtgatgtgtgcgttcaactcacagagtttaacttttcttctcatagagcagttaggaaacactctgtttgtaaagtgtgcaagtggatattcagacctctttgaggccttcgttggaaaagggatttcttcatattatgctagacagaagaattctcagtaacttccttggtgttgtgtgtattcaaatgacagagttgaactttcatttagagagagcagatttgaaacactgtttttgtggaatttgcaagtggagatttcaagcgctttggggccaaaggcagaaaaggaaatatcttcgtataaaaactagacagaatcatcctcagaaactgcactgtgatgtgtgcgttcaactctcagtgtttaacttttcttttcattcagcagtttggaaacactctgtttgtaaagtctgcacgtggatattttgaccacttagaggccttcgttggaaacgggtttttttcatgtaatgctaggcagaagaattcccagtaacttccttgtgttgtgtgcattcaactcacagagctgaactttcccttagacagagcagatttgaaacactctatttgtgcaatttgcaagtgtagatttcaagcgctttaaggtcaatggcagaaaaggaaatatcttcgtttcaaaactagacagaatcattcccacaaacagcgttgtgatgtgttcgttcaactcacagagtttaacctttcttttcatagagcagttaggaaacagtctgtttgtcaattctgtaagtggatattctgacatcttgtggcattcgttggaaacgggatttcttcatattctgctagacagaagaattctcagtaacttccttgtgttgtgtgtattcaactcacagagttgaacgatcctttacacagagcagacttgaaacactctttttgtggaatttgcaagtggagatttcagccgctttcaggtcaatggtagaataggaaatatcttcctatagaaactagacagaatgattctcagaaactcctttgtgatgtgtgcgttcaactcacagagtttaacctttcttttcatagagcagttaggaaacactctgtttgtaaagtctgcaagtggatattcagacctctttcaggccttcgttggaaacgggatgtcttcatattatgctagacagaagaattcccagtaacttccttgtgttgtgtgtgttcgactcacagagttgaactttcatttacacagagcagatttgaaacactctttttgtggaatttgcaagtggagatttcaagcgctttgaggccaaaggcagaaaaggaaatatcttcgtataaaaactagacagaatcattctcagaaactgctctgcgatgtgtgcgttcaactctcagagtttaacttttcttttcattcagcagtttggaaacactctgtttgtaaagtctgcacgtggataacttgaccacttagaggcctttgttggaaatgggtttttttcatgtaaggctagacagaagtattctcagtaacttccttgtgttgtgtgtattcaactcacagagttgaacgatcctttacacagagcggacttgtaacactctttttgtggaatttgcaagtggagatttcagccgctttgaagtcaaagttagaaaaggaaataacttcctataaaaactagacagaatcattcccacaaactgcgttgtgatgtgttcgttcatctcacagagtttaacctttcttttcatagagcagttaggaaacactctgtttgtaaattctgtaagtggatattctgacatcttgtggccttcgttggaaacgggatttcttcatattctgctagacagaagaattctcagtaacttccttgtgttgtgtgtattcaactcacagagttgaacgatcctttacacagagcggacttgaaacactcgttttgtggaatttgcaagtggagatttcagccgcgttgaggtcaatggtagaaaagggaatatcttcgtataaaaactagacagagtgattctcagaaactcctttgtgatgtgtgcgttcaactcacagagtttaacctttcttttcatagagcagttaggaaacactctgtttgtaaagtctgcaagtggatattcagacctccttgaggccttcgttggaaacgggatttcttcatattctgctatacagaagaattctcagtaacttccttctgttgtgtgtattcaactgacagagttgaagtttcatttagagagagcagatttgaaacactgtttttgtggaatttgcaagtggagatttcaagcgctttgggaccaaaggcagaaaaggaaatatcttcgtataaaaactagacagaatgattctcagaaactcctttgtgatgtgtgcgttcaactcacagagtttaacctttcttttcatagagcagttaggaaacactctgcttgtaaagtctgcaagtggatattcagccctctttgaggccttcgttggaaacgggtttttttcacataaggctagacagaagaattcccagtaacttccttgtgttgtgtacattcaactcacagagttgaacgttcccttagacagagcagatttgaaacagtctttttgtgcaattggcaaatggagatttcaagcgctttaaggtcaatggcagaaaaggaaatatcttcgtttcaaaactagacagaatcattcccacaaactgcgttgtgatgtgttcgttcaactcacagagtttaacctttctgttcatagagcagttaggaaacactctgtttgtaaagtctgtaagtggatatactgacatcttgtggccttcgttggaaacgggatttcttcatattctgctagacagaagaattctcagtaacttccttgtgttgtgtgtattcaactcacagagttgaacgatcctttacacagagcagacttgtaacactctttttgtggaatttgcaagaggagatttcagccgctttgaagtcaaaggtagaaaaggaaatatcttcctataaaaactagacagaataattctcagaaactcctttgtgatgtgtgcgttcaactcacagagtttaacctttcttttcatagagcagttaggaaacactctgtttgtaaagtctgcaagtggatattcagacctctttgaggccttcgttggaaacgggtttttttcatataaggctagacagaagaattcccagtaacttccatgtgttgtgtgtgttcaactcacagagttgaactttcattttcacagagcagatttgaaacactctttttgtggaatttgcaaatggagatttcaagcgctttgaggccaaaggcagaaaaggaaatatcttcgtataaaaactagacagaatcattctcagaaactgctgcgtgatgtgtgctttcaactctcagagtttaacttttcttttcattcagcggtttggaaacactctgtttgtaaagtctgcacgtggatattttgaccacttagaggccttcgttggaaacgggtttttttcatgtaaggctagacagaagaattcccagtaacttccttgtgttgtgtacattcaactcacagagttgaacgttcccttagacagagcagatttgaaacactctttttgtgcaattggcaaatggagatttcaagcgctttaagttcaatggcagaaaaggaaatatcttcgtttcaaaactagacagaatcattcccacaaactgcgttgtgatgtgttcgttcaactcacagagtttaacctttctgttcatagaggagttaggaaacactctgtttgtaaagtctgtaagtggatattctgacatcttgtggccttcgttggaaacgggatttcttcatattctgctagacagaagaattctcagtaacttccttgtgttgtgtgtattcaactcacagagttgaacgatcctttacacagagcagacttgaaacactctttttctggaatttgcaagtggagatttcagccgctttgaggtcaattgtagaaaaggaaatatcttcgtataaaaactagacagaatgattctcagaaactcctttgtgatgtctgcgttcaactcacagagtttaacctttcttttcatagagcagttaggaaacactctgtttgtatagtctgcacgtggatatttggacttctttgaggccttcgttggaaacgggtttttttcatgtaaggctagacagaagaattctcagtaacttccttctgttgtgtgtattcaactgacagagttgaactttcatttagagagagcagatttgaaacactgtttttgtggaatttgcaagtggagatttcaagcgctttggggccaaaggcagaaaaggaaatatccttcgtataaaaactagacagaatcattctcagaaactgctctgcgatgtgtgcgttcaactctcagagtttaagttttcttttcattcagcagtttggaaacactctgtttgtaaagtctgcacgtggatattttgaccacttagaggccttcgttggaaacgggtttttttcctgtaaggctagacagaagaattcccagtaacttccttgtgttgtgtacattcaactcacagagttgaaagttcccttagacacagcagatttgaaacactctttttgtgcaattggcaaatggagatttcaagcgctttaaggtcaatggcagaaaaggaaatatcttcgtttcaaaactagacagaatcattctcagaaactgctctgcgatgtgtgcgttcaactctcagagtttaacttttcttttcattcagcagtttggaatcactctgtttgtaaagtctgcacgtacataatttgaccacttagaggccttcgttggaaacaggtttttttcatgtaaggctagacagaagaattctcagtaacttccttgtgttgtgtgtattcaactcacacagttgaacgatcctttacacagagcagacttgtaacactctttttgtggaatttgcaagtggagatttcagccgctttgaagtcaaaggtagaaaaggaaatatcttcctataaaaactagacagaatgattctcagaaacttctttgtgatgtgtgcgttcaactcacagagttcaacctttcttttcatagagcagttaggaaacactctatttgtaaactctgcaagtggatattcagacctctttgaggccttcgttggaaacgggatttcttcatactatgctagacagaagaattctcagtaacttccttgtgttgtgtgtattcaactgacagagttgaactttcatttagagagagcagatttgaaacactgtttttgtggaatttgccagtggagatttcaagcgctttggggccaaaggcagaaaacgaaatatcttcgtataaaaactagacagagtcattctcagaaactgctctgtgatgtgtgcgttcaactctcagagtttaacttttcttttcattcagcagtttggaaacactctgtttgtaaagtctgcacgtggataatttgaccacttagaggccttcgttggaaacgggtttttttcatgtaaggctagacagaagaattcccagtaacttccttgcgttgtgtacattcaactcacagagttgaacgttcccttagacagagcagatttgaaacactctttttgtgcaattggcaagtggagatttcaagcgctttaaggtcaatggcagaaaaggaaatatcttcgtttcaaaactagacagaatcattcccacaaactgcgttgtgatgtgttcgttcaactcacagagtttaacctttcttttcatagagcagttaggaaacactctgttgttaaattctgtaagtggatattctgacatcttgtggccttcgttggaaacgggatttctacatattctgccagacagaacaattctcagtaacttccttgtgttgtgtgtattcaactcacagagttgaacgatcctttacagagagcagacttgaaacactctttttgtggaatttgcaagtggagatttcagccgctttgaggtcaatggtagaataggaaatatcttccaatagaaactagacagaatgattctcagaaactcctttgtgatgtgtgtgttcaactcactgagtttaacctttcttttcatagagcagttaggaaacactctgtttgtaaagtctgcaagtggatattcagacctctttgaggccttcgttggaaacgggattttttcatataaggctagacagaggaattcccagtaacttccttgtgttgtgtgtgttcaactcacagagttgaactttcatttacacagagcagatttgaaacactctttttgtggaatttgcaagtggagatttcaagcgctttgaggccaatgcagaaaaggaaatatcttcgtataaaaactagacagaatcattctcagaaactgctctgcgatgtgtgcgttcaactctcagagtttaacttttcttttcattcagcagtttggaaacaatctgtttgtaaagtctgcacgtggataatttgaccacttagaggccttcgttgcaaacgggtttttttcctgtaaggctagacagaagaattcccaggaacttccttgtgttgcgtacattcaactcacacatttgaacgttcccttagacagagtagatttgaaacactctttttgtgcaattggcaagtggtgatttcagccgctttgaggtcaatggtagaaaaggaaatatcttcatataaaaactagacagataatcattcccacaaactgcgttgtgatgtgttcgttcaactcacagagtttaacctttctgttcatagagcagttaggaaacactctgtttgtaaagtctgtaagtggatattctgacatcttgtggccttcgttggaaacgggatttcttcctattctgctagacagaagaattctcagtaacttccttgtgttgtgtgtattcaactcacagagttgaacgatcctttacacagagcagacatgtaacactctttttctggaatttgcaagtggagatttcagccgctttgaagtcaaaggtagaaaaggaaatatcttcctataaaaactagacagaatgattctcagaaactcctttgtgatgtgtgcgttcaactcacagagtttaacctttcttttcatagagcagttaggaaacactctgtttgtaaagtctgcaagtggatattcagacctctttgaggccttcgatggaaacgggatttcttcatattctgctagacagaagaattctcagtaacttccttgtgttgtgtgtattcaactcacagagttgaacgatcctttacacagggcagacttgaaacactctttttggggaatttgcaagtggagatttcagcctctttgaggttaatggtagaaaatgaaatatcttcgtatagaaactagacagaatcattctcagaaactgctctgtgatgtgtgcgttcaactctcagagtttaacttttcttttcattcagcagtttggaaacactctgtttgtaaagtctccacgtggataatttgaccacttagaggccttcgttggaaacgggtttttttcatgtaaggctagacagaagaattcccagtaacttccttgtgttgtgtacattcaactcacagagctgaacgttcccttagacagagcagatttgaaacactctttttgtgcaattggcaagtggtgatttcagctgctttgaggtcaatggtagaaaagggaatatcttcgtataaaaactagacagaatcattctcagaaactgctctgcgatgtgtgcgttcaactctcagagtttaacttttcttttcattcagcagtttggaaacactctgtttgtaaagtctgcacgtggataatttgaccacttagaggccttccttggaaacgggtttttttcatgtaagtctagacagaagaattcccagtaacttccttgtgttgtgtacattcaactcacagagttgaacgtttccttagacagagcagatttgaaacactctttttgtgcaattggcaagtggtgatttcagccgctttgaggtcaatggtagaaaaggaaatatcttcgtaaaaaaactagacagaatgattctcagaaacttcattgtgatgtgtgcgttcaactcacagagtttaacctttcttttcatagagcagttaggaaacactctgtttgtaaactctgcaagtggatattcacacctctttgaggccttcgttggaaacgggatttcttcatactgtgctagacagaagaattctcagtaacttccttgtgttgtgtgtattcaactcacagagttgaacgatcctttacacagagcagacttgaaacactctttttgtggaatttgcaagtggagatttcagccgcgttgaggtcaatggtagaaaaggtaatatcttcgtataaaaactagacagaatcattctcagaaactgctgcgtgatgtgtgcgttcaactctcagagtttaacttttcttttcattcagcggtttggaaacactctgtttgtaaagtctgcacgtggaaattttgtccacttagaggccttcgttggaaacgggtttttttcatgtaaggctagacagaagaattcccagtaacttccttgtgttgtgtgcattcaactcacagagttgaacgttcccttagacagagcagatttgaaacactctatttgtgcaatttgcaagtgtagttttcaagctctttaaggtcaacggcagaaaaggaaatatcttcgtttcaaaactagacagaatgattctcagaaactcctttgtgatgtgtgcgttcaactcacagagtttaacctttcttttcatagagcagttgggaaacactctgtttgtaaagtctgcaagtggatattcagacctccttgaggctttcgttggaaacgggatttcttcatattctgctagacagaataattctcagtaacttccttgtgttgtgtgtattcaactcacagagttgaacgatcctttacacagagcaaacttgaaacactctttttgtggaatttgcaagtggagatttcagccgctttgaggtcaatggtagaataggaaatatcttcctatagaaactagacagagtgattctcagaaactcctttgtgatgtgtgcgttcaactcacagagtttaacctttcttttcatagagcagttaggaaacactctgtttgtaaagtctgcaagtggatattcagacatccttgaggctttcgttggaaacgggatttcttcatattctgctagaaagaagaattcccagtaacttccttgtgttgtgtgtgttcaactcacagagttgaactttcatttacacagagcagatttgaaacactctttttgtgcaatttgcaagtggagatttcaagcgctttgaggccaaaggcagaaaaggaaatatcttcgtttcaaaactagacagaatcattctcagaaactgctgcgtgatgtgtgcgttcaacactcagagtttaacttttcttttcattcagcggtttggaaacactctgtttgtaaagtctgcacgtggataatttgaccacttagaggccttcgttggaaacgggattttttcatgtaaggctagacagaagaattcccagtaacttccttgtgttgtgtgcattcaactcacagagttgaacgttcccttagacagagcagatttgaaacactctatttgtgcaatttgcaagtgtagttttcaagctctttaaggtcaacggcagaaaaggaaatatcttggtttcaaaactagacagaatgattctcagaaacttctttgtgatgtgtgcgttcaactcacacagtttaacctctcttttcatagagcagttaggaaacactctgtttgtaaagtctgcaagtggatattcagacctccttgaggccttcgttggaaacgggatttcttcatattatgctagacagaagaattctcagtaacttccttgttttgtgtgtattcaactcacagagttgaacgatcctttacacagagcagacttgtaacactctttttgtggaatttgcaagtggagatttcagccgctttgaagtcaaaggtagaaaaggaaatatcttcctataaaaactaaacagataatgattctcagaaactcctttgtgatgtgtgcgttcaactcacagagtttaacctttcttttcatagagcagttagtaaacactctgtttataaagtctgcaagtggatattcagacccctttgaggccttcgttggaaacgggatttcttcatattctgctagacagaagaattctcagtaacttccttgtgttgtgtgtattcaactcacagagttgaactttcatttggagagagcagatttgaaacactgtttttgtggaatttgcaagtggagatttcaagcgctttggggccaaaggcagaaaaggaaatatcttcgtataaaaacgagacagaatcattctcagaaactgctgcgtgatgtgtgcgttcaactctcagagtttaacttttcttttcattcagcggtttggaaacactctgtttgtaaagtctgcacgtggatattttgaccacttagaggccttcgttggaaacgggtttttttcaagtaaggctagacagaagaattctcagtaacttccttgtgttgtgtgtattcaactcacagagttaaacgatcctttacacagaggagacttgtaacactctttttgtggaatttgcaagtggagatttcagccgctttgaagtcaaaggtagaaaaggaaatatcttcctataaaaactagacagaatcattcccacaaactgcgttgtgatgtgttcgttcatctcacagagtttaacctttcttttcgtagagcagttaggaaacagtctgtttgtaaattctgtaagtggatattctgacatcttgtggccttcgttggaaacgggatttcttcatattctgctagacagaagaattctcagtaacttccttgtgttgtgtgtattcaactcacagagttgaatgatcctttacacagaacagtcttgaaacactctttttgtggaatttgcaagtggagatttcatccgctttgaggtcaatggtagaataggaaatatcttcctatagaaactagacagaatgattctcagaaacttctttgtgatgtgtgcgttcaactcacagagtttaacctttcttttcatagagcagttaggaaacactctgtgtgtaaactctgcaagtggatattcagacctgtttgaggccttcgttggaaacgggatttcttcatactatgctagacagaagaattccaagtaacttccttgtgttgtgtgtgttcaactcacagagttgaactttcatttacacagagcagatttgaaacactctttttgtggaatttgcaagtggagatttcaagcgctttgagggcaaaggcagaaaaggaaatatcttcgtttcaaaactagacagaatcattcccacaaactgcgttgtgatgtgttcgttcagctcacagagtttaacctttcttttcatagagcagttaggaaacactctgttggtaaattctgtaagtggatattctgacatcttgtggccttcgttggaaacgggatttcttcatattctgctagacagaagaattcccagtaacttccttgtgttgtgtgcattcaactcacacagttgaacgttccgttagacagagcagatttgaaacactctttttgtgcaatttgcaagtggagatttcaagcgctttagggtcaatggcagaaaaggaaatatcttcgtttcaaaactagacagaatcattcccacaaactgcgttgtgatgtgttcgttcaactcacagagtttaacctttcttttcatagagcagttaggaaatactctgtttgtaaagtctgcaagtggatattcagacctctttgaggccttcgttggaaacgggatttcttcatattctgctggacagaagaattctcagaatcttccttgtgttgtgtgtattcaactcacagagttgaacgatcctttacacagagcagacttgaaacactctttttgtggaatttgcaagtggagatttcagccgctttgaagtcaaaggtagaaaaggaaataacttcctataaaaactagacagaatgattctcagaaactcctttgtgatgtgtgcgttcaactcacacagtttaacctttcttttcatagagcagttaggaaacactctgtttgtaaagtctgcaagtggatattcagacctccttgaggccttcgttggaaacgggatttcttcatattatgctagacagaagaattctcagtaacttccttgtgttgtgtgtattcaactcacagagttgaacgatcctttacacagagcagacttgaaacactctttttgtggaatttgcaagtggagatttcagccgctttgaggtcaatggtagaataggaaatatcttcatatagaaattagacagaatcattctcagaaactgctctgcgatgtgtgtgttcaactctcagagtttaacttttcttttcattcagcagtttggaaacactctgtttgtaaagtctgcacgtggatattttcaccacttagaggccttcgttggaaacgggtttttttcctgtaaggctagacagaagaattcccagtaacttccttgtgttgtgtacattcaactcacagagttgaacgttcccttagacagagcagatttgaaacactctttttgtgcaattggcaaatggagatttcaagcgctttaaggtcaatggcagaaaaggaaatatcttcgtttcaaaactagacagaatgattctcagaaactcctttgtgatgtgtgcgttcaactcacagagttcaacctttcttttcatagagcagttgggaaacactctgtttgtaaagtctgcaagcggatattcagacttctttgaggccttcgttggaagcgggatttcttcatattctgctagacagaagaattctcagtaacttccttgtgttgtgtgtattcaactcacagagttgaacgatcctttacacagagcagacttgaaacactctttttgtggaatttgcaagtggggatttcagccgctttgaggtcaatggtagaataggaaatatcttcctatagaaactagacagaatgattctcagaaactcctttgtgatgtgtgcgttcaactcacagagtttatcctttcttttcatagagcagttaggaaacactctgtttgtaaagtctgcaagtggatattcagacatccttgaggctttcgttggaaacgggatttcttcatattctgctagaaagaagaattctcagtaacttccttgtgttgtgtgtattcaactcacagagttgaacgatccttttcacagagcagacttgaaacactctttttgtggaatttgcaagtggagatttcagccgctttgaggtcaatggtagaataggaaatatcttcctaaagaaactagacagaatcattctcagaaactgctgcgtgatgtgtgcgttcaactctcagagtttaacttttcttttcattcagcggtttggaaacactctgtttgtaaagtctgcacgtggatattcagacctctttgaggccttcgttggaaacgggtttttttcatgtaaggctagacagaagaattcccagtaacttccttgtgttgtgtgcattcaactcacagagttgaacgttcccttagacagagcagatttgaaacactctatttgtgcaatttgcaagtgtagatttcaagcgcattaaggtcaatggcagaaaaggaaatatcttcgtttcaaaattagacagaatcattcccacaaactgcgttgtgatgtgttcgttcaactcacagagtttaacctttctgttcatagagcagttaggaaacactctgtttgtaaagtctgcaagtggatattcagacctccttgaggccttcgttggaaacgggatttcttcatattctgctagacagaagaattctcagtaacttccttgtgttgtgtgtattcaactcacagagttgaccgatcctttacacagagcagacttctaacactctttttgtggcatttgcaagtggagatttcagccgctttgaagtcaaaggtagaaaagggaatatcttcctataaaaactagacagaatgattctcagaaacttctttgtgatgtgtgcgttcaactcacagagtttaacctttcttttcatagagcagttaggaaacactctgtttgtaaagtctgcaagtggatattcagacctctttgaggccttcgttggaaacgggttttttacatataaggctaaacagaagaattccccagtaacttccttgtgttgtgtgtgttcaactcacagagttgaactttcatttacacagagcagatttgaaacactctttttgtggaatttgcaagtggagatttcaagcgctttgaggccaaaggcagaaaaggaaatatcttcgtataaaaactagacagaatcattctcagaaactgctgcgtaatgtgtgcgttcaactctcagagtttaacttttcttttcattcagcggtttggaaacactctgtttgtaaagtctgcacgtggaaattttgaccacttagaggccttcgttggaaacgggtttttttcatgtaaggctagacagaagaattcccagtaacttccttgtgttgtgtgcattcaactcacagagttgaacgttcccttagacagagcagatttgaaacactctatttgtgcaatttgcaagtgtagatttcaagcgctttaaggtcaacggcagaaaaggaaatatcttcgtttcaaaactagacagaatcattcccacaaactgcgttgtgatgtgttcgttcaactcacagagtttaacctttctgttcatagagcagttaggaaacactctgtttgtaaagtctgtaagtggatattctgacaacttgtggccttcgttggaaacgggatttcttcctattctgctagacagaagaattctcagtaacttccttgtgttgtgtgtattcaactcacagagttgaacgatcctttacacagagcagacttgaagcactctttttgtggaatttgcaagtggagattccagcctctttgaggtcaatagtagaaaaggaaatatcttcgtagaaaaactagacagaatgattctcataaactcctttgtgatgtctgcgttcaactcacagagtttaacctttcttttcatagagcagttaggaaacactctgtttgtaaagtctgcaagtggatattcagacctctttgaggccttcgttggaaacgggatttcttcatattatgctagacagaagaattctgagtaacttccttgtgttgtgtgtattcatctgacagagttgaactttcagttagacagagcagaattcaaacactgtttttgtggaatttgcaagtggagatttcaagcgctttggggccaaaggcacaaaaggaaatatcttcgtataaaaattagacagaatcattctcagaaactgctctgcgatgtgtgcgttcaactctcagagtttaacttttcttttcattcagcagtttggaaacactctgtttgtaaagtctgcacgtggataacttgaccacttagaggacttcgttggaaacgggtttttttcctgtaaggctagacagaagaattcccagtaacttccttgtgttgtgtgcattcaactcacagagttgaacgttcccttagacagagcagatttgaaacactctatttgtgcaatttgcaagtgtagttttcaagctctttaaggtcaacggcagaaaaggaaatatcttcgtttcaaaactagacagaatcattcccaaaaactgcgttgtgatgtgttcgttcatctcacagagtttaacctttcttttcatagagcagttaggaaacactctgtttgtaaattctgtaagtggatattctgacatcttgtggccttcgttggaaacgggatttcttcatattctgctagacagaataattcttagtaatttccttgtgttgtgtgtattcaactcacagagttgaaggatcctttacagagagcaggcttgaaacactctttttgtcgaatttgcaagtggagatttcagccgctttgaggtcaatggtagaataggaaatatcttcttatagaaactagacagaatgattctcagaaactcctttgtgatgtgtgcgttcaacacacacagtttaacctttcttttcatagagcagttaggaaacactctgtttgtaaagtctgcaagtggatattcagacctccttgaggccttcgttggaaactggatttcttcatattatgctagacagaagaattctcagtaacttcccttgtgttgtgtgtattcaactgacagagttgaactttcatttggagagagcagatttgaaacactgtttttgtggaatttgcaagtggagatttcaagcgctttggggccaaaggcagaaaaggaaatatcttcgtagaaaaactagacagaatcattctcagaaactgctgcgtgatgtgtgcgttcaactctcagagtttaacctttcttttcattcagcggtttggaaacactctgtttgtaaagtctgcacgtggatattttgaccacttagaggccttcgttggaaacgggtttttttcatgtaaggctagacagaagaattcccagtaacttccttgtgttgtgtacattcaactcacagagttgaacgttcccttagacagagcatatttgaaacactctttttgtgcaattggcaagtggagatttcaagcgctttaaggtcaatggcagaaaaggaaatatcttcgtttcaaaactagacagaatgattctcataaactcctttgtgatgtgtgcgttcaacacacagagtttaacctttctgttcatagagcagttaggaaacactctgtttgtaaagtctgtaagtgcatattctgacatcttgtggccttcgttggaaacgggatttcttcatattctgctagacagaagaattctcagtaacttccttgtgttgtgtgtattcaactcacagggttgaacgatcctttacacagagcagacttgaaacactctttttgtggaatttgcaagtggcgatttcagcctctttgaggtcaatggtagaataggaaatatcttcctatagaaaatagacagaatgattctcagaaactcctttgtgatgtgtgcgttcaactcacagagtttaacctttctttttatagagcagttaggaaacactctgtttgtaaagtctgcaagtggatattcagacctccttgaggccttctttggaaacgggatttcttcctattatgctagacagaagaattctcagtaacttccttgtgttgtgtgtattcaactgacagagttgaactttcatttagagagagcagatttgaaacactgtttttgtggaatttgcaaatggagatttcaagcgctttggggccaaaggcagaaaaggaaatatcttcggtataaaaactagacagaatcattctcagaaactgctctgtgatgtgtgcgttcaactctcaggagtttaacttttcttttcattcagcagtttggaaacactctgtttgtaaagtctgcacgtggataatttgaccacttagaggccttcgttggaaacgggtttttttcatgtaaggctagacagaagaattcccagtaacttccttgtgttgtgtgcattcaactcacagagttgaaagttcccttagacagagcagatttgaaacactctatttgtgcaatttgcaagtgtagatttcaagcgctttaaggtcaacggcagaaaaggaaatatcttcgtttcaaaactagacagaatcattcccacaaactgcgttgtgatgtgttcgttcaactcacagagtttaacctttcttttcatagagcacttaggaaacagtctgtttgtaaattctgtaagtggatattctgacatcttgtgcccttcgttggaaacgggatttcttcatattctgctagacagaagaattctcagaatcttccttgtgttctgtgtattcaactcacagagttgaacgatggtttacacagagcagatttgaaacactctttttgtggaattagcaagtggagatttcagccgctttgaggtcaatggtagaaaaggaaatatcttcgtataaaaactagacagaatgattctcagaaaatcttttgtgatgtgtgcgttcaactcacagagtttaacttttcttctcatagagcagttaggaaacactctgtttgtaaagtctgcaagtggatattcagacctctttgaggccttcgttggaaacgggatttcttcatattatgccagacagaagaattcccagtaacttccttgtgttgtgtttgttcaactcacagagttgaactttcatttacacagagcagatttgaaacactctttttgtggaatttgcaagtggagatttcaagcgctttgaggccaaaggcagaaaaggaaatatcttcgtttcaaaactagacagaatcattctcagaaagtgctctgcgatgtgtgcgttcaactctcagagtttaactttgcttttcattcagcagtttggaaacactctgtttgtaaagtctgcacgtggataatttgaccacttagaggccttcgttggaaacgggtttttttcatgtaaggctagacagaagaattcccagtaacttcccttgtgttgtgtacattcaactcacagagttgaacgttcccttagacagagcagatttgaaacactctttttgggcaattggcaagtggagattacaagcgctttaaggtcaatggcagaaaaggaaatatcttcgtttcaaaactagacagaatcattcccacaaactgcgttgtgatgtggtcgttcaactcacagagcttaacctttctgttcatagagcagttaggaaacactctgtttgtaaagtctataagtggatattctgacatcttgtggccttcgttggaaacgggatttcttcatattctgctagacagaataattctcagtaacttccttgtgttgtgtgtattcaactcagagagttgaacgatcctttacagagagcagacttgaaacactctttttgtggaatttgcaagtggagatttcagccgctttgaggtcaatggtagaaaaggaaatatcttcgtataaagactagacagaatgattctcagaaactcctttgtgatgtgtgcgttcaactcacagagtttaacctttcttttcatagagcagttaggaaacactctgtttctaaagtctgcaagtggatattcagacatctttggggccttcgttggaaacgggatttcttcatgttctgctagacagaagaattcccagtaacttccttgtgttgtgtacattcaactcacagagttgaacgttcccttagacagagcagatttgaaacacactttttgtgcaattggcaagcggagatttcaagcgctttaaggtcaatggcagaaaaggaaatatcttcgtttcaaaactagacagaatcattctcagaaactgctctgcgatgtgtgcgttcaactctcagagtttaacttttcttttcattcagcagcttggaaacactctgtttgtaaagtctgcacgtggatattttgaccacttagaggccttcgttggaaacgggtttttttcctgtaaggctagacagaagaattcccagtaacttccttgtgttgtgtgcattcaactcacagagttgaacgttcccttagacagagcagatttgaaacactctatttgtgcaatttgcaagtgtagatttcaagcgctttaaggtcaatggcagaaaaggaaatatcttcgtttcaaaactagacagaatcattcccacaaactgcgttgtgatgtgttcgttcaactcacagagtttaacctttcttttcatagagcagttaggaaacagtctgtttgtcaattctgtaagtggatattctgacatcttgtggcattcgttggaaacgggatttcttcatattctgctagacagaagaattctcagtaacttccttgtgttgtgtgtattcaactcacagagttgaacgatcctttacacagagcagacttgaaacactctttttgtggaatttgtaagtggagatttcagccgcgttgaggtcaatggtagaaaaggaaatatcttcgtataaaaactagacagaatgattctcagaaactcctttgtgatgtgtgtgttcaactcacagagtttaacctttcttttcatagagcagttaggaatcactctgtttgtaaagtctgcaagtggatattcagacctctttgaggccttcgttggaaacgggtttttttcatataaggctagacagaagaattctcagtaacttcccctgtgttgtgtgtattcaactgacagagtcgaactttcatttagagagagcagatttgtaacactgtttttgtggaatttgcaagtggagatttcaagcgctttggggccaaaggcagaaaaggaaatatcttcgtataaaaactagacagaatcattctcagaaactgctgcgtgatgtatgcgttcaactctcagagtttaacttttcttttcattcagcagtttggaaacactctgtttgtaaagtctgcacgtggatattttgaccacttagaggccttcgttggaaacgggtttttttcatgtaaggctagacagaagaattcccagtaacttccttgtgttgtgtgcattcaactcacagagttgaacgttcccttagacagagcagatttgaaacactctatttgtgcaatttacaagtgtagttttcaagctctttaaggtcaacggcagaaaaggaaatatcttcgtttcaaaactagacagaatgattctcataaactcctttgtgatgtgtgcgttcaactcacagagtttaacctttcttttcatagagcagttaggaaacactctgtttgtaaagtctgcaactggatattcagacctctttgaggccttcgttggaaacgggatttcttcatattctgctagacagaagaattctcagtaacttctttgtgttgtgtgtattcaactcacagagttgaacgatcctttacacagagcagacttgaaacactctttttgtggaatttgcaagtggagatttcagccgctttgaggtcaatggtagaataggaaatatcttcctatagaaaatagacagaatgattctcagaaactcctttgtgatgtgtgcgttcaactcacagagtttaacctttcttttcatagagcagttaggaaacactctgtttgtaaagtctgcaagtggatactcagacctccttgaggccttcgttggaaacgggatttcttcatattatgctagacagaagaattctcagtaacttcccttgtgttgtgtgtattcaactcacagagttgaacgatcctttacagagagcagacttgaaacactctttttgtggaatttgcaagtggagatttcagccgctttgtggtcaatggtagaataggaaatatcttcctatagaaactagacagaatgattctcagaaactcctttgtgatgtgtgcgttcaactcacagagtttaacctttcttttcatagagcagttaggaaacactctgtttgtaaagtctacaagttgatatacagacctctttgaggccttcgttggaaacgggatttcttcatattctgctagagagaagaattcccagtaacttccttgtgttgggtgcattcaactcacagagttgaacgttcccttagacagagcagatttgaaacagcctatttgtgcaatttgcaagtgtagatttcaagcgctttaaggtcaactgcaggaaaggaaatatcttcctttcaaaactagacagaatcattcccacaaactgcgttgtgatgtgttcgttcaactcacagagtttaacctttctgttcatagagcagttaggaaacactctgtttgtaaagtcagtaagtggatattctgacatcttgtggcctttgttggaaacgggatttcttcatattctgctagacagaataattctcagtaacttccttgtgttgtgtgtattcaactcacagtagttgaacgatcctttacagagagcagacttgaaacactctttttgtggaattcgcaagtggagatttcagccgctttgaggtcaatggtagaaaaggaaatgtcttcgtataaagactagacagaatgattctcagaaactcctttgtgatgtgtgcgttcaactcacagagtttaacctttcttttcatagagtagttaggaaacactctgcttgtaaagtctgcaagtggatattcagccctctttgaggccttcgttggaaacgggtttttttcatataaggctagacagaagaattctcagtaacttccttgtgttgtgtgtattcaactgacagagttgaactttcatttagagagagcagatttgaaacactgtttttgtggaatttgcaagtggagatttcaagcgctttggggccaaaggcagaaaaggaaatatcttcgtataaaaactacacagaatcattctcagaaagtgctctgcgatgtgtgcgttcaactctcagagtttaactttgcttttcattcagcagtttggaaacactctgtttgtaaagtctgcacgtggataatttgaccacttagaggccttcgttggaaacgggtttttttcatgtaaggctagacagaagaattcccagtaacttccttgtgttgtgtgcattcaactcacagagttgaacgttcccttagacagagcagatttgaaacactctatttgtgcaacttgcaagtgtagttttcaagctctttaaggtcaacggcagaaaaggaaatatcttcgtttcaaaactagacagaatgattctcagaaactcctttgtgatgtgtgcgttcaactcacagagtttaacttttcttttcaaagagcagttaggaaacactctctttgtaaagtctgcaagtggatattcagacctctttgaggccttcgttggtaacgggatttcttcatattctgctagacagaagaattctcagtaacttccttgtgttgtgtgtattcaactcacagagttgaacgatcctttacacagagcagacttgaaacattctttttgtggaatttgcaagtggagatttcagccgctttgaggtcaatagtagaaaaggaaatatcttcgtagaaaaactagacagaatgattctcagaaactcctttgtgatgtgtgcgttcaactcacagagtttaacctttcttttcatggagcagttaggaaacactctgtttgtaaagtctgcaaggggatattcagacctctttgaggctttcgttggaaacgggatttcttcatattctgctagacagaagaattcccagtaacttccttgtgttgtgtgttttcaactcacagagttgaactttcatttacccagagcagatttgaaacactctttttgtggaatttgcaagtggagatttcaagcgctttgaggccaaaggcagaaaaggaaatatcttcgtttcaaaactagacagaatcattctcagaaactgctgcgtgatgtgtgcgttcaactctcagagtttaacttttcttttcattcagcggtttggaaacactctgtttgtaaagtctgcacgtggatattttgaccacttagaggccttcgttggaaacgggttttcttcatgtaaggctagacagaagaattcccagtaacttccttgtgttgtgtacattcaactcacagagttgaacgttcccttagacagagcagatttgaaacactctttttgtgcaattggcaagtggagatttcaagcgctttaaggtcaatggcagaaaaggaaatatcttcgtttcaaaactagacagaatcattcccacaaactgcgttgtgatgtgttcgttcaactcacacagtttaacctttcttttcatagagcagttaggaaacactctgttggtaaattctgtaagtggatattctgacatcttgtggcctccgttggaaacgggatttcttcatattctgctagacagaataattctcagtaacttccttgtgttgtgtgtattcaactcacagagttgaacgatcctttacagagagcagatttgaaacactctttttgtggaatttgcaagtggagatttcagccgctttgaggtcaaaggtagaatagcaaatatcttcctatagaaactagacagaacgattctcagaaactcctttgtgatgtgtgcgttcaactcacagagtttaacctttcttttcatagagcagttaggaaacactctgtttgaaaagtctgcacgtggatattcagacctctttgaggccttcgttggaaacgggatttcttcctattctgctagacagaagaattcccagtaacttcctagtgttgtgtgtgttcaactcacagagttgaactttcatttacacagaacagatttgaaacactctttttgtggaatttgcaagtggagatttcaagcgctttgaggccaaaggcagaaaaggaaatatcttcgtataaaaactagacagaatcattctcagaaactgctctgcgatgtgtgcgttcaactctcagagtttaacttttcttttcattcagcaatttggaaacagtctgtttgtaaagtctgcacgtggataacttgaccacttagaggccttcgttggaaacgggtttttttcatgtaaggctagacagaagaattcccagtaacttccttgtgttgtgtgcattcaactcacagagttgaacgttcccttagacagagcagatttgaaacactctatttgtgcaatttgcaagtgtagatttcaagcgctttaaggtcaatggcagaaaaggaaatatcttcgtttcaaaactagacagaatgattctcagaaactgctttgtgatgtgtgcgttaaactcacagagtttaacctttcttttcatagagcagttaggaaacactctgtttgtaaagtctgcaagtggatattcagacatctttgaggctttcgttggaaacgggatttcttcatattctgctaggcagaagaattctcagaaacttcgatgtgttgtgtgttttcaactcacagagttcaacgatcatttacacagagtagacttgaaacactctttttgtggaattggcagggtggagatttcagccgctttgaggtcaatggtagaaaaggaaatatcttcgtataaaaactagacagagtgattctcagaaactcctttgtgatgtctgcgttcaactcacagagtttaacctttcttttcatagagcagttaggaaacactctgtttgtaaagtctgcaagcggatattcagacctccttgagggcttcgttggaaacgggatttcttcatattatgctagacagaagaattcccagtaacttccttgtgttgtgtttgttcaactcacagagttgaactttcatttacacagagcagatttgaaacactctttttgtggaatttgcaaatggagatttcaagcgctttgaggccaaaggcagaaaaggaaatatcttcgtataaaaactagacagaatcattctcagaaactgctgcgtgatgtatgcgttccactatcagagtttaacttttcttttcattcagcggtttggaaacactctgtttgtaaagtctgcacgtggatattttgaccacttagaggccttcgttggaaacgggttttttgcatgtaaggctagacagaagaattcccagtaacttccttgtgttgtgtgcattcaactcacagtgttgaacgttcccttagacagagcagatttgaaacactctatttgtgcaatttgcaagtgtagatttcaagcgctttaaggtcaatggcagaaaaggaaatatcttcgtttcaaaactagacagaatcattcccacaaactgcgttgtgatgtgttcgttcacctcacagagtttaacctttctgttcatagagcagttaggaaacactctgtttgtaaagtctgtaagtggatattctgacatcttgtggccttcgttggaaacgggatttcttcatattctgctagacagaagaattctcagtaacttccttgtgttgtgtgtattcaactcacagagttgcaggatcctttacacagagcagacttgaaacactctttttctggaatttgcaagtggagatttcagccgctttgaggtcaatggtagaataggaaatatcttcctatagaaactagacagaatgattctcagaaacttctttgtgatgtgtgcgttcaactcacagagtttaacctttcttttcatagggcagttaggaaacactctgtttgtaaagtctgcaagtggatattcagacctccttgaggccttcgttggaagcgggatttcttcatgttctgctagacagaagaattctcagtaacttccttgtgttgtgtgtattcaactgacagagttgaactttcatttagagagagcagatttgaaacactgtttttgtggaatttgcaagtggagatttcaaacgctttggggccaaaggcagaaaaggaaatatcttcgtatgaaaactagacagaatcattctcagaaactgctctgcgatgtgtgcgttcaactctcagagtttaacttttcttttcattcaacagtttgaaaacactctgtttgtaaagtctgcacgtggatattttgaccacttagaggccttcgttggaaacgggtttttttcttgtaaggctagacagaagaattctcagtaacttccttgtgttgtgtgtattcaactcacagagttgaacgatcctttacacagagcagacttgtaacactctttttgtggaatttgcaagtggagatttcagccgctttgaagtcaaatgtagaaaaggaaatatcttcctataaaaactagacataaggattctcagaaactcctttgtgatgtgtgcgttcaactcacagagtttaatctttctgttcatagagcagttaggaaacactctgtttgtaaagtctgcaagtggatattcagacctccttgaggccttcgttggaaacgggatttcttcatattctgctagacagaagaattctcagtaacttccttgtgttgtgtgtattcaactcacagagttgaacgatcctttacacagagcagacatgaaacactctctttgtggaatttgcaagtggagatttcagccgctttgaggtcaatagcagaaaaggaaatatcttcgtagaaaaactagacagaatgattctcagaatctcctttgtaatgtgtgcgttcaactcacagagtttaacctttcttttcatagagcagttaggaaacactctgtttgtaaagactgcaagtggatattcagacctctttgcggccttcgttggaaacgggatttcttcatattctgctagacagaagaattcccactaacttccttgtgttgtgtgtgttcaactcacagagttgaactttcatttacacagagcagatttgaaacactctttttgtggaatttgcaagtggagatttcaagcgctttgaggccaaaggcagaaaaggaaatatcttcgtttcaaaactatacagaatcattctcagaaacttctctgcgatgtgtgcgttcaactctcagagtttaacttttcttttcattcagcagtttggaaacactctgtttgtaaagtctgcacgtggatattttgaccacttagaggccttcgttggaaacgggtttttttcctgtaaggctagacagaagaattcccagtaacttccttgtgttgtgtacattcaactcacagagttgaacgttcccttagacagagcagatttgaaacactctttttgtgcaattggcaagtggtgatttcagcctctttgaggtcaatggtagaaaaggaaatatcttcgtataaaaactagatagaatgattctcagaaacttcattgtgatgtgtgtgttcaactcacagagtttaacctttcttttcatagagcagttgggaaacagtctgtttgtaaattctgtaagtggatattctgacatcttgtggccttcgttggaaacgggatttcttcatattctgctagacagaagagttctcagtaacttccttgtgttgtgtctattcaactcacagagttgaacgatcctttacacagagcagacttgaaacactctttttgtggaatttgcaagtggagatttcagccgctttgaggtcaatggtagaaaaggaaatatcttcgtataaagactagacagaatgattctcagaaactcctttgtgatgtgtgtgttcaactcacagtgtttaacctttcttttcatagagcagttagtaaacactctgtttataaagtctgcaagtggatattcagacccctttgaggccttcgttggaaacgggatttcttcatattatgctagacagaagaattctcagtaacttccttgtgttgtgtgtattcaactgacagagttgaacgttcatttagagagagcagatttgtaacactgtttttgtggaatttgcaagtggagatttcaagcgctttggggccaaaggcagaaaaggaaatatcttcgtataaaaactagacagaatcattctcagaaactgctctgcgatgtgtgcgtataactctcagagtttaacttttcttttcattcagcagtttggaaacactctgtttgtaaagtctgcacgtggataatttgaccacttagagaccttcgttggaaacgggtttttttcatgtaaggctagacagaagaattcccagtaacttccttgtgttgtgtacattcaactcacagagttgaacgttccctcagacagagcagatttgaaacactctttttgtgcaattggcaaatggatatttcaagcgctttaaggtcaatggcagaaaaggaaatatcttcgtttcaaaactagacagaatgattctcagaaactcctttgtggtgtgtgcgttcaactcacagagtttaacctttcttttcatagagcagttaggaaacactctgtttgtaaagtctgcaagtggatattcagacctctttgaggccttcgttggaaacgggatttcttcatattctgctagacagaagaattctcagtaacttccttgtgttgtgtgtattctactcacagagttgaacgatcctttacacagagcagacttgaaacactctttttgtggaatttgcaagtggagatttcagccgctttgaggtcaatagtagaaaaggaaatatcttcgtagaaaaactaggcagaatgattctcagaaactcctttgtgatgtgtgtgctcaactcacagagtttaacctttcttttcatagagcagttagtaaacactctgtttataaagtctgcaagtggatattcagacccctttgaggccttcgttggaaacgggatttcttcatattatgctagacagaagaattctcagtaacttccttgtgttgtgtgtattcaactcacagagtagaacgatcctttacacagagcagacttgaaacactctttttgtggaatttgcaagtggagatttcaagcgctttgaggccaaaggcagaaaaggaaatatcttcgtataaaaactagacagaatcattctcagaaactgctctgcgatctgtgcgttcaactctcagagtttaacttttcttttcattcagcagtttggaaacactctgtttgtaaagtctacacgtggatattttgaccacttagaggccttcgttggaaacgggtttttttcctgtaaggctagagagaagaattcccagtaacttccttgtgttgtgtacattcaactcacagagttgaacgttcccttagacagagcagatttgaaacactctttttgtgcaattggcaagtggtgatttcaaccgcttttaggtcaatggtagaaaaggaaatatcttcgtataaaaactagacagaatcattcccacaaactgcgttgtgatgtgttcgttcaactcacagagtttaacctttcttttcatagagcagttaggaaacactctgtttgtaaattctgtaagtggatattctgacatcttgtggccttcgttgcaaacgggatttcttcatattctgctagacagaagaattctcagtaacttccttgtgttgtgtgtattcaactcacagagttgaacgatggtttacacagagcagatttgaaacactctttttgtggaatttgcaagtggagatttcagccgctttgaggtcaatggtagaaaaggaaatatcttcgtataaaaactagacagaagcattctcaaaaactcctttgtgaggcttgtgttcaactcccagaggataacattgcttttcatagagcagttttgaaacattcttttcgttgagtctccaagtggacatttggagcgctttcaggcctgtggtggaaaaggaaatatcttcacataaaaactagagagaagaattctcagtaacttccttgtgttgtgtgtattcaactgacagagttgaactttcatttagagagagcagatttgaaacactgtttttgtggaatttgcaagtggagatttcaagcgctttggggccaaaggcagaaaaggaaatatcttcgtttaaaaactagacagaatcattctcagcaactgctgcgtgatgtgtgagttcaactctcagagtttaccttttcttttcattcagcggtttggaaacactctgtttgtaaagtctgcacgtggatattttgaccacttagaggccttcgttggaaactggattttttcatgtaaggctagacagaaaaattcccagtaacttccttgtgttgtgtgcattcaactcacagagttgaacgttcccttagacagagcagatttgaaacactctatttgtgcaatttgcaagtgtagatttcaagcgctttaaggtcaacggcagaaaaggaaatatcttcgttttaaaactagacagaatcattcccacaaactgcgttgtgatgtgttcgttcaactcacagagtttaacctttctgttcatagagcagttaggaaacactctgtttgtaaagtctgtaagtggatattctgacatcttgtggccttcgtttgaaaagggatttcttcatattctgctagacagaagaattctcagaaacttccttgtgttgtgtgttttcaactcacagagttgaacgatgctttacacagagtagacttgaaacactctttttgtgtaatttgcaagtggagatttcagccgctttgaggtcaatggtagaataggaaatatcttcctatagaaactagacagaatgattctcagaacctcctttgtgatgtgtgcgttcaactcacagagtttaacctttcttttcatagagcagttaggaaacactctgtttgtaaagtctgcaagtggatattcagacctccttgaggctttcgttggaaacgggatttcttcatattctgctagaaagaagaattcccagtaacttccttgtgttgtgtgtgttcaactcacagagttgaactttcatttacacagagcagatttgaaacactctttttgtggaatttgcaagtggagatttcaagcgctttgaggccaaaggcagaaaaggaaatatcttcgtataaaaaccagacagaatcattctcagaaactgctgcgtgatgtgtgcgtccaactctcagagtttaacttttcttttcattcagcggtttggaaacactctgtttgtaaagtctgcacgtggatattttgaccacttagaggccttcgttggaaacgggtttttttcatgtaaggctagacagaagaattcccagtaacttccttgtgttgtgtgcattcaactcacagagttgaacgttcccttagacagagcagatttgaaacactctatttgtgcaatttgcaagtgtagatttcaagcgctttaaggtcaatggcagaaaaggaaatatcttcgtttcaaaactagacagaatcattcccacaaactgcgttgtgatgtgttcgttcaactttcagagtttaacctttctgttcatagagcagttaggaaacactctgtttgtaaagtctgtaagtggatattctgacatcttgtggccttcgttggaaacgggatatcttcatattctgctagacagaataattctcagtaacttccttgtgttgtgtgtattcaactcacagagttgaacgatcctttacacagagcagacttgaaacactctttttgtggaatttgcaagtggagatttcagccgctttgaggtcaatggtagaaaaggaaactatcttcatataaagactagacagaatgattctcagaaactccgttgtgatgtgtgcgttcaactcacagagtttaacctttcttttcatagagcagttaggaaacactctgtttgtaaagtctgcaagtggatatccagacctctttgaggccttcattggaaacgggatttcttcatattctgctagacagaagaattctcagtaacttccttgtgttgtgtgtattcaactgacagagttgaactttcatttagagagagcagatttgaaacactgtttttgtggaatttgcaagtggagatttcaagcgctttggggccaaaggtagaaaaggaaatatcttcgtataaaaactagacagaatcattctcagaaactgctctgcgatgtgtgcgttcaactctcagagtttaactttgcttttcattcagcagtttggaaacactctgtttgtaaagtctgcacgtcgataatttgaccacttagaggccttcgttggaaacgggtttttttcatgtaaggctagacagaagaattcccagtaacttccttgtgttgtgtgcattcaactcacagagttgaacgttcccttagacagagcagatttgaaacactctatttgtgcaatttgcaagtgtagatttcaagcgctttaaggtcaatggcagaaaaggaaatatcttcgtttcaaaactagacagaatgattctcagaaactcctttgtgatgtgtgcgttcaactcacagagtttaacctttctgttcatagagcagttaggaaacactctgtttgtaaagtctgtaagtggatattctgacatcttgtggccttcgttggaaacgggatttcttcatattctgctagacagaagaattctcagtaacttccttgtgttgtgtgtattcaactcacagagttgaacgatcctttacacagagcggacttgaaacactcgttttgtggaatttgcaagaggagatttcagccgcgttgaggtcaatggtagaaaaggaaatatcttcgtataaaaactagacagaatgattctcagaaactcctttgtgatgtgtgcgttcaactcacagagtttaacctttcttttcatagagcagttaggaaacactctgtttgtaaagtctgcaagtggatattcagacctccttgaggccttcgttggaaacgtgatttcttcatattctgctagacagaagaattcccagtaacttccttgtgttgtgtgtgttcaactcacagagttgaactttcatttacccagagcagatttgaaacactctttttgtggaatttgcaagtggagatttcaagcgctttgaggccaaaggcagaaaaggaaatatcttcgtataaaaactagacagaatcattctcagaaactgctgcgtgatgtgtgcgttcaactctcagagtttaacttttcttttcattcagcggtttggaaacactctgtttgtaaagtctgcacgtggaaattttgaccacttagaggccttcgttggaaacgggttttttcatttaaggctagacagaagaattcccagtaacttccttgtgttgtgtgcattcaactcacagagttgaacgttcccctagacagagcagatttgaaacactctatttgtgcaatttgcaagtgtagttttcaagctcttttaggtcaacggcagaaaaggaaatatcttggtttcaaaactagacagaatcattcccacaaactgcgttgtgatgtgttcgttcaactcacagtgtttaacctttcttttcatagagcagttaggaaacagtctgtttgtaaattctgtaagtggatattcagacctctttgaggccttcgttggcaacgggatttctccatactgtgctagacagaagaattctcagtaacttccttgtgttgtgtgtattcaactcacagagttgaacgatcctttacacagagcagagttgaaacactctttttgtggaatttgcaagtggagatttcagccgctttgaggtcaatggtagaataggaaatatcttcatacagaaactagacagaatgattctcagaaacttctttgtgatgtgtgcgttcaactcacagagtttaacctttcttttcatagagcagttaggaaacactctgtttgtaaactctgcaagtggatactcagacctctttgaggccttcgttggaaacgggatttctccatactgtgatagacagaagaaatcccattaacttccttgtgttgtgtgtgttcaactcacagagttgaactttcatttacacagagcagatttgaaacactctttttgtggaatttgcaagtggagatttcaagcgctttgaggccaaaggcagaaaaggaaatatcttcgtttcaaaactagacagaatcattctcagaaactgctctgcgatgtgtgcgttcaactctcagagtttaactttgcttttcattcagcagtttggaaacactctgtttgtaaagtctgcacgtggataatttgaccacttagaggccttcgttggaaacgggtttttttcatataaggctagacagaagaattcccagtaacttccttgtgttgtgtacattcaactcacagagttgaacgttcccttagacagagcagatttgaaacactctttttgtgcaattggcaaatggagatttcaagcgctttaaggtcaatggcagaaaaggaaatatcttcgtttcaaaactagacaggatcattcccacaaactgcgttgtgatgtgttcgttcaactcacagagtttaacctttcttttcatagagcagttaggaaacagtctgtttgtcaattctgtaagtggatattctgacatcttgtggccttagttggaaacgggatttcttcatattctgctagacagaagaattctcagtaacttcttggtgttgtgtgtattcaactcacagagttgaacgatgctttacacagagcagacttgaaacactcgttttgtggaatttgcaagttgagatttcagccgctttgaggtcaatggtagaaaaggaaatatcttcgtataaaaactagacagaatgattctcagaaactcctttgtgatgtgtgtgttcaactcacagagttaaacctttcttttcatagagcagttaggaaacactctgtttgtaaagtctgcaagtggatattcagacctctttgaggccttcgttggaaacgggtttttttcatataaggctagacagaagaattcccagtaacttccttgtgttgtgtgtgttcaactcacagagttgaactttcatttacacagagcagatttgaaacactctttttgtgggatttgcaggtggagatttcaagcgctttgaggccaaaggcagaaaaggaaatatcttcgtataaaaactagacagactcattctcagaaactgctctgcgatgtgtgcgttcaactctcagagtttaacttttcttttcattcagcagtttggaaacactctgtttgtaaagtctgcacgtggatattttgaccacttagaggccttcgttggaaacggttttctttcctgtaaggctagacagaagaattcccagtaacttccttgtgttgtgtacattcaactcacagagttgaacgttcccttagacagagcagatttgaaacactctttttgtgcaattggcaagtggagatttcaagcgctttaaggtcaatggcagaaaaggaaatatcttcgtttcaaaactagacagaatcattcccacaaactgcgttgtgatgtgttcgttcaactcacagagtttaacctttcttttcatagagcagttaggaaacactctgtttgtaaagtctacaagtggatattcagacctctttgaggccttcgttggaaacgggtttttttcatataaggctagacagaagaattctcagtaacttccttgtgttgtgtgtattcaactcacagagttgaacgatcctttacacagagcagacttgaaacactttttttgtggaatttgcaagtggagatttcagccgctttgaggtcaatagtagaaaaggaaatagcttcgtagaaaaactagacagaattgttctcagaaactcctttgtgatgtgtgcgttcaactcacagagtttaacctttcttttcatagagcagttaggaaacactctgtttgtaaagtctggaagtggatattcagacctccttgaggccttcgttggaaacgggatttcttcatattatgcttgacagaagaattctcagtaacttccttgtgttgtgtgtattcaactgacagagttgaactttcatttagagagagcagatttgaagcactgtttttgtggaatttgcaagtggagacttcaagcgctttgggccaaaggcagaaaaggaaataccttcgtataaaaactagacagaatcattctcagaaactgctgcgtgatgtgtgctttcaactctcagagtttaacttttcttttcattcagcggtttggaaacactctgtttgtaaagtctgcacgtggaaattttgaccacttagaggccttcgttggaaacgggtttttttcatgtaaggccagacagaagaattctcagtaacttcccttgtgttgtgtgtattcaactgacagagttgaactttcatttagagagagcagatttgaaacactgtttttgtggaatttgcaagtggagatttcaagcgttttggggccaaaggcagaaaaggaaatatcttcgtataaaaactaggcagaatcattctcagaaactgctctgcgatgtgtgtgttcaactctcagagtttaacttttcttttcattcagcagtttggaaacactctgtttgtaaagtctgcacgtggataattggaccacttagaggccttcgttggaaacgggtttttttcatgtaaggctatacagaagaattctcagtaacttccttgtgttgtgtgtattcaactcacagagttgaacgatcctttacacagagcagacttgtaacactctttttgtggaatttgcaagtggagatttcagccgctttgaagtcaaaggtagaaaaggaaatatcttcttataaaaactagacagaatgattctcagaaactcctttgtgatgtgagcgttcaactcacagagtttaacctttcttttcatagagcagttaggaaacactctgcttgtaaagtctgcaagtggatattcagccctctttgaggccttcgttggaaacgggtttttttcatatagggctagacagaagaattctcagtaacttccttgtgttgtgtgtattcaactgacagagttgaactttcatttagagagagcagatttgcaacactgtttttgtggaatttgcaagtggagatttcaagcgctttggggccaaaggcagaaaaggaaatatcttcggataaaaactagacagaatcattctcagaaactgctctgcgatgtgtgcgttcaactctaagagtttaacttttcttttcattcagcagtttggaaacactctgtttgtaaagtctgtacgtggataatttgaccacttagaggccttcgttggaaacgggtttttttcatgtaaggatagacagaagaattcccagtaacttccttgtgttgtgtgcattcaactcacagagttgaacgttcccttagacagagcagatttgaaacactctatttgtgcaatttgcaagtgtagttttcaagctctttaaggtcaacggcagaaaaggaaatatcttggtttcaaaactagacagaatgattctcataaactcctttgtgatgtgtgcgttcaactcacagagtttaacctttcttttcatagagcagttaggaaacactctgtttgtaaagtctgtaagtggatattctgacatcttgtggccttcgttggaaacgggatttcttcatattctgctagacagaagaattctcagtaactttcttgtgttgtgtgtattcaactcacagagttgaacgatcctttacagagagcagacttgaaacactctttttgtggaatttgcaagtggagatttcagccgctttgaggtctatggtagaaaaggaaatgtcttcgtataaagactagacagaatgattctcagaaactcctttgtgatgtgtgtgttcaactcacagagtttaacctttcttttcatagagcagttaggaaacactctgtttgtaaagtctgcaagtggatattcagacctctttgaggccttcattggaaacgggtttttttcatagaaggctagacagaagaattcccagtaacttccttgtgttgtgtgtgttcaactcacagagttgaactttcatttacacagagcagatttgaaacactctttttctggaatttgcaagtggagatttcaagcgctttgaggccaaaggcagaaaaggaaatatcttcgtataaaaactagacagaatcattctcagaaactgctctgcgatgtgtgcgttcaactctcagagtttaactttgcttttcattcagcagtttggaaacactctgtttgtaaagtctgcacgtggataatttgaccacttagaggccttcgttggaaacgggtttttttcatgtaaggctagacagaagaattctcagtaacttccttgtgttgtgtgtattcaactcacacagttgaccgatcctttacacagagcagacttgtaacactctttttgtggaatttgcaagtggagatttctgccgctttgaagtcaaaggtagaaaagggaatatcttcctataaaaactagacagaatgattctcagaaactcctttgtgatgtgtgcgttcaactcacagagtttaacctttctgttcatagagctgttaggaaacactctgtttgtaaagtctgcaagtggatattcagacctccttgaggacttcgttggaaacgggatttcttcatattctgctagacagaagaattctcaataacttccttgtgttgtgtgcattcaactcacagagttgaatgatcctttacacagagcagattagaaacactctttttgtggaatttgcaagtggacatttcagccgctttgaggtcaatggtagaaaaggaaatatcttcgtataaaaactagacagaatgattctcagaaactcctttgtgatgtgtgcgttcaactcacagagtttaacctttcttttcatagagcagttaggaaacactctgtttgtaaactctgcaagtggatattcagacctctttgaggccttcgttggaaacgggtttttttcatataaggctagacagaagaattctcagtaacttccttgtgttgtgtgtattcaactgacagagttgaactttcatttagagagagcagatttgaaacactgtttttgtggaatttgcaagtggagatttcaagcgctttggggccaaaggcagaaaaggaaatatcttctgtataaaaactagacagaatcattctcagaaactgctctgcgatgtgtgcgttcaactctcagagtttaacttttcttttcattcagcagtttggaaacactctgtttgtaaagtctgcacgtggatattttgaccacttagaggccttcgttggaaacgggtttttttcctgtaaggctagacagtagaattcccagtaacctccttgtgttgtgtgcattcaactcacagagttgaacgtttccttagacagagcagatttgaaacactctatttgtgcaatttgcaagtgtagatttcaagcgctttaaggtcaatggcagaaaaggaaatatcttcgtttcaaaactagacagaatgattctcataaactcctttgtgatgtgtgcgttcaactcacagagtttaacctttcttttcatagagcagttaggaaacactgtgtttgtaaagtctgcatgtggatattcagacctccttgaggccttcgttggaaacgggaattcctcatattctgctagacagaagaattctcagtaacttccttgtgttgtgtttattcaactcacagagttgaatgatcctttacacagagcagacttgaaacactctttttgtggaatttgcaagtggagatttcagccgctttgaggtcaatggtagaaaaggaaactatcttcatataaagactagacagaatgattctcagaaactcctttgtgatgtgtgcgttcaactcacagcagtttaacctttcttttcatagagcagttaggaaacactctgtttgtaaagtctgcaagtggatattcagacctccttgaggccttcgttggaaacgggtttttttcatataaggctagacagaagaattctcagtaacttccttgtgttgtgtgtattcaactgacagagttgaactttcatttagacagagtagatttgaaacactctttttgtggaatttgcaagtggagatttcaagcgctttgaggccaaaggcagaaaaggaaatatcttcgtataaaaactagacagaatcattctcagaaactgctgcgtgatgtgtgcgttcaactctcagagtttaacttttcttttcattcagcggtttggaaacactctgtgaagtctgcacgtggatattttgaccacttagaggccttcgttggaaacgggtttttttcaagtaaggctagacagaagaattcccagtaacttccttgtgttgtgtgcattcaactcacagagttgaacgttcccttagacagagcagatttgaaacactctatttgtgcaatttgcaagtgtagatttcaagcgctttaaggtcaatggcagaaaaggaaatatctttgtttcaaaactagacagaatcattcccacaaactgcgttatgatgtgttcgttcaactcacagagtttaacctttctgttcatagagcagtgaggaaacactctgtttgtaaagtctgtaagtggatattctgacatcttgtggccttcgttggaaaagggatttcttcctattctgctagacagaagaattctcagtaacttccttgtgttgtgtgtattcaactcacagaattgaacgatcctttacacagagcagacttgaaacactctttttgtggaatttgcaagtggagatttcagccgcgttgaggtcaatggtagaaaaggaaatatcttcgtataaaaactagacagaatgattctcagaaactcctttgtgatgtgtgcgttcaactcacagagttcaacctttcttttcatagagcagttaggaaacactctgtttgtaaagtctgcaagtggatattcagacttctttgaggccttcgttggaagcgggttttcttcatattctgctagaaagaagaattctcactaacttccttgtgttgtgtttattcaactcacagagttgaatgatcctttacacagagcagacttgaaacactctttttgtggaatttgcaagtggagatttcagccgctttgaggtcaatggtagaaaagtaaatatcttcgtataaagactagacagaatgattctcagaaactcctttgtgatgtgtgcgttcaactcacagagtttaacctttctgttcatagagcagttaggaaacactctgtttctaaagtctgcaagtggatattcagacctccttgaggccttcgttggaaacgggatttcttcatattctgctagacagaagaattcccagtaacttccttgtgttgtgtgcattcaactcacagagttgaacgttcccttagacagagcagatttgaaacactctatttgtgcaatttgcaagtgtagatttcaagcgctttaaggtcaacggcagaaaaggaaatatcttcgtttcaaaactatacagaatgattctcagaaaatcttttgtgatgtgtgcgttcaactcacagagtttaacttttcttctcatagaccagttaggaaacactctgtttgtaaagtgtgcaagtggatattcagacctctttgaggccttcgttggaaacgggatttcttcatattctgctagacagaagaattctcagtaacttccttgtgttgtgtgtattcaactcacagagttgaaggatcctttacagagagcaggcttcaaacactctttttgtcgaatttgcaagtggagatttcagccgctttgaggtcaatggtagaataggaaatatcttcttatagaaactagacagaatgattctcagaaacttctttgtgatgtgtgcgttcaactcacagggtttaacctttcttttcatagagcagttaggaaacactctgtttgtaaactctgcaagtggatattcagacctctttgaggccttcgttggaaacgggatttcttcatactgtgctagacagaagaattcccagtaacttccttgtgttgtgtgtgttcaactcacagagttgaactttcatttacacagagcagatttgaaacactctttttgtggaatttgcaagtggagatttcaagcgctttgaggccaaaggcagaaaaggaaatatcttcctataaaaactagacagaatcattctcagaaactgctgcgtgatgtgtgcgttcaactctcagagtttaacttttcttttcattcagcggtttggaaacactctgtttgtaaagtctgcacgtggatattatgaccatttagaggccttcgttggaaacgggttttcttcatgtaaggctagacagaagaattcccagtaacttccttgtgttgtgtgcattcaactcacagagttgaacgttcccttagacagagcagatttgaaacactctatttgtccaatttgcaagtgtagatttcaagcgctttaaggtcaacggcagaaaaggaaatatcttcgtttcaaaactagacagaatgattctcagaaactcctttgtgatgtgtgctttcaactcacagagtttaacctttcttttcatagagcagttaggaaacactctgtgtataaagtctgcaagtggatattcaggcctctttgaggccttcgttggaaacgggatttcttcatatgatgctggacagaagaaatctcagtaacttccttgtgttgtgtgtattcaactcacagagttgaacggtcctttacacagagcagatttgaaacaatgtttttgtggaatttgcaagtggagatttcagccgctttgaggtcaatcgcagaaaaggaaatatcttcttatagaaactagacagaatgattctcagaaactcctttgtgatgtgtgcgttcaactcacagagttcaacctttcttttcatagagcagttaggaaacactctgtttataaactctgcaagtggatattcagacctctttgaggccttcgttggaaacgggatttcttcatattctgctagacagaagaattcccagtaacttccttgtgttgtgtgtgttcaactcacagagttgaactttcatttacacagagcagatttgaaacactctttttgttgaatttgcaagtggagatttcaagcgctttgaggccaaaggcagaaaaggaaatatcttcgtttcaaaactagacagaatcattctcaggaaactgctctgcgatgtgtgcattcaactctcagagtttaacttttcttttcattcagcagtttggaaacactctgtttgtaaagtctgcacgtggatattttgaccacttacaggccttcgttggaaacgggtttttttcctgtaaggctagacagaagaattcccagtaacttccttgtgttgtgtgcattcaactcacagaattgaacgttcccttagacagagcagatttgaaacactctatttgtgcaatttgcaagtgtagatttcaagcgctttaaggtcaacggcagaaaaggaaatatcttcgtttcaaaactagacagaatgattctcagaaactcctttgtgatgtgtgccgttcaactcacagagtttaacctttcttttcatagagcagttaggaaacactctgtttgtaaagtctgcaagtggatattcagacctccttgaggccttcgttggaaacgggttttcttcatattatgctagacagaagaattctcagtaacttccttgtgttgtgtgtattcaactcacagtgttgaacgatcctttacacagagcatacttgaaacactcttgttgtggaatttgcaagtggagatttcagccgctttgaggtcaatggtagaataggaaatatcttcctatagaaactagacagaatgattctcagaaactcctttgtgatgtgtgcgttcaactcacagagttcaacctttcttttcatagagcagttgggaaacactctgtttgtaaagtctgcaagtggatattcagacttatttgaggccttagttggaagcgggatttcttcatgttctgctagacagaagaattcccagtaacttccttgtgttgtgtgtgttcaactcacagagttgaactttcatttacccagagcagatttgaaacactctttttgtggaatttgcaagtggagatttcaagcgctttgaggccaaaggcagaaaaggaaatatcttcgtataaaaactagacagaatcattctcagaaactgctctgcgatgtgtgcgttcaactctcagagtttaacttttcttttcgttcagcagtttggaaacactctgtttgtaaagtctgcacgtggataatttgaccacttagaggccttcgttggaaacgggtttttttcatgtaaggctagacagaataattcccagtaacttccttgtgttgtgtacattcaactcacagagttgaacgttcccttaaacagagcagatttgaaacactctttttgtgcaattggcaagtggagatttcaagcgctttgaggtcaatggcagaaaaggaaatatcttcgtttcaaaactagacagaatcattcccaaaaactgcgttgtgatgtgttcgttcatctcacagagtttaacctttcttttcatagagcagttaggaaacactctgtttgtaaattctgtaagtggatattctgacatcttgtggccttcgttggaaacgggatttcttcatattctgctagacagaagaattctcagaaacttccttgtgttgtgtgtattcaactcacagagttgaacgatcgtttacacagagcagacttgaaacactctttttgtggaatttgtaagtggagatctcagccgctttgaggtcaatggtagaaaaggaaatatcttcatataaaaactagacagaatgattctcagaaactcctttgtgatgtgtgcgttcaactaacagagtttaacctttcttttcatagagcagttaggaaacactctgtttgtaaagtctgcaagtggatattcagacctctttgaggccttcgttggaaacgggttttttcatataaggctagacagaagaattctcagtaacgtccttgtgttgtgtgtattcaactgacagagttgaactttcatttagagagagcagatttgaaacactgtttttgtggaatttgcaagtggagatttcaagcgctttggggccaaaggcagaaaaggaaatatcttcgtataaaaactagacagaatcattctcagaaactgctctgcgatgggtgcgttcaactctcagagtttaacttttcttttcattcagcagtttggaaacactctgtttgtaaagtctgcacgtggatattttgaccacttagaggccttcgttggaaacgggtttttttcctgtaaggctagacagaagaattcccagtaacttccttgtgttgtgtacattcaactcacagagttgaacgttcccttagacagagcagatttgaaacactctttttgtgcaattggcaaatggagatttcaagcgctttaaggtcaatggcagaaaaggaaatatcttcgtttcaaaactagacagaatgattctcagaaactcctttgtgatgtgtgcgttcaactcacagagtttaacctttcttttcatagagcagttaggaaacactgtttgtaaagtctgcaagtggatattcagacctctctgaggccttcgttggaaacgggatttcttcatactgtgctagacagaagaattctcagtaacttccttgtgttgtgtgtattcaactcacagagttgaacgatcctttacacagagcggacttgaaacacactttttgtggaatttgcaagtggagatttcagccgcattgaggtcaatggtagaaaaggaaatatcttcatataaaaaatagacagaatgattctcagaaactcctttgtgatgtgtgttttcaactcacagagtttaacctttcttttcatagagcagttagtaaacactctgtttataaagtctgcaagtggatattcagacccctttgaggccttcgttggaaacgggatttcttcatattatgctagacagaagaattctcagtaacttccttgtgttgtgtgtattcaactgacagagttgaacttgcatttagagagagcagatttgaaacactctttttgtggaatttgcaagtggagatttcaagcgctttggggccaaaggcagaaaaggaaatatcttcgtataaaaactagacagaatcattctcagaaactgctgcgttatgtgtgcgttcaactctcagagtttaacttttcttttcattcagcggtttggaaacactctgtttgtaaagtctgcacgtggatattttgaccacttagaggccttcgttggaaacgggtttttttcatgtaaggctagacagaagaattcccagtaacttccttgtgttgtgtacattcaactcacagagttgaacgttcccttagacagagcagatttgaaacactctttttgtgcaattggcaaatggagatttcaagcgctttaaggtcaatggcagaaaaggaaatatcttcgtttcaaaactagacagaatcattcccacaaactgcgttgtgatgtgttcgttcaactcacagagtttaacctttctgttcatagagcagttaggaaacactctgtttgtaaagtctgcaagtggatattcagacctccttgaggccttcgttggaaacgggatttcttcatattctgctagacagaagaattctcagtaacttccttgtgttgtgtttattcaactcacagagttgaatgatcctttacacagagcagacttgaaacactctttttgtggaatttgcaagtggagatttcagccgctttgaggtcaatggtagaaaagtaaatattttcgtataaagactagacagaatgattctcagaaactcctttgtgatgtgtacgttcaactcacagagtttaacctttcttttcatagagaagttaggaaacactctgtttgtaaagtctgcaagtggatattcagacctctttgaggccttcgttggaaacgtgttttttacatataagtctagacagaagaattcccagtaacttccttgtgttgtgtgtgttcaactcacagagttgaactttgatttacacagagcagatttgaaacactctttttgtggaatttgcaggtggagatttcaagcgctttgaggccaaaggcagaaaaggaaatattcttcgtataaaaactagacagaatcattctcagaaactgctgcgtgatgtgtgcgttcaactctcagagtttaaattttcttttcattcagcggtttggaaacactctgtttgtaaagtctgcacgtggatattttgaccacttagaggccttcgttggaaacgggttttttgcatgtaaggctagacagaagaattcccagtaacttccttgtgttgtgtgcattgaactcacagagttgaacgttcccttagagagggcagatttgaaacactctatttgtgcaatttgcaagtgtagatttcaagcgctttaaggtcaacggcagaaaaggaaatatcttcgtttcaaaactagacagaatcattcccacaaactgtgctgtgatgtgttcgttcaactcacagagtttaacctttctgttcatagagcagttaggaaacactctgtttgtaaagtctgcaagtggatattcagacctccttgaggccttcgttggaaacgggatttcttcatattctgctagacagaagaattctcagtaacttcccttgtgttgtgtgtattcaactcacagagttgaacgatcctttacacagagcagacttgtaacactctttttgtggaatttgcaagtggagatttcagccgctttgaagtcaaaggtagaaaaggaaatatcttcctataaaaactagacagaatgattctcataaactcctttgtgatgtgtgcattcaactcacagagtttaacctttcttttcatagagcagttaggaaacactctgtttgtaaagtctgcaagtggatattcagacctccttgaggccttcgttggaaaagggatttcttcatattctgctagacagaagaattcgcagtaacttccttgtgttgtgtgtgttcaactcacagagttgaactttcatttacacagagcagatttgaaacactctttttgtggaatttgcaggtggagatttcaagcgctttgaggccaaaggcagaaaaggaaatatcttcgtataaaaactagacagaatcattctcagaaactgctctgcgatgtgtgcgttcaactctcagagtttaacttttcttttcattcagcagtttggaaaaactctgtttgtaacgtctgcacgtgcataatttgaccacttagaggccttcgttggaaacgggtttttttcctgtaaggctagacagaagatttctcagtaacttccttgtgttgtgtgtattcaactcacagagttgaaagatcctttacacagagcagactggtaacactctttttgtggaatttgcaagtggagatttcagccgctttgaagtcaaaggtagaaaaggaaataacttcctataaaaactagacagaatcattcccacaaactgcgttgtgatgtgttcgttcaactcacagagtttaacctttctgttcatagagcagttaggaaacactctgtttgtaaagtctgccagtggatattcagacctccatgaggccttcgttggaaacgggatttcttcatattctgctagacagaagaattctcagaatcttccttgtgttgtgtgtattcaactcacagagttgaaccatcctttacacagagcagacttgaaacactctttttgtggaatttgcaagtggagatttcagccgctttgaggtccatggtagaaaaggaaatatcttcgtataaaaactagacagaatgattctcagaaacttctttgtgatgtgtgcgttcaagtcacagagtttaacctttcttttcatagagcagttaggaaacactctgtttgtaaactctgcaagtggatgttcagacctgtttgaggccttcgttggaaacgggatttcttcatactatgctagacagaagaattcccagtaacttccttgtgttgtgtgagttcaactcacagagttgaactttcatttacacagagcagatttgaaacactctttttgtggaatttgcaagtggagatttcaagcgctttgacgccaaaggcagaaaaggaaatatcttcgtataaaaattagacagaatcattctcagaaactgctctgtgatgtctgcgttcaactctcagagtttaacttttcttttcattcagcagtttggaaacactctgtttgtaaagtctgcacgtggatattttgaccacttagaggtcttcgttggaaacgggtttttttcatgtaaggctagacagaagaattcccagtaacttccttgtgttgtgtacattcaactcacagagttgaacgttcccttagacagagtagatttgaaacactctttttgtgcaattggcaagtggagatttcaagcgctttaaggtcaatggcagaaaaggaaatatcttcgtttcaaaactagacagaatcattcccacaaactgcgttgtgatgtgttcgttcaactcacagagtttaacctttcttttcatagagcagttaggaaacagtctgtttgtaaattctgtaagtggatattctgacatcttgtggcctttgttggaaacgggatttcttcatattctgctagacagaagaattctcagaatcttccttgtgttgtgtgtattcaactcacagagttgaacgatcctttacacagagcagacttgaaacactctttttgtggaatttgcaagtggagatttcaagcgctttgaggccaaaggcagaaaaggaaatatcttcgtataaaaactagacagaatgattctcagaatcttctttgtgatgtgtgcgttcaactcacagagtttaacctttcttttcatagagcagttaggaaacactctgtttgtaaactctgcaagtggatattcagacctcattgaggccttcgttggaaacgggatttcttcatactatgctagacagaagaattctcagtaacttccttgtgttgtgtgtattcaactcacagagttgaacgaccctttacacagagcggacttgaaacactctttttgtggaatttgcaagtggagatttcagccgcgttgaggtcaatggtagaaaaggaaatatcttcgtatagaaactagacagaatcattctcagaaactgctctgcgatgtgtgcgttcaactctcagagtttaacttttcttttcattcagcagtttggaaacactctgtttctaaagtctgcacgtggatattttgaccacttagaggccttcgttggaaacgggtttttttcctgtaaggctagacagaagaattcccagtaacttccttgtgttgtgtacattcaactcacagagttgaacgttcccttagacagagcagatttgaaacactctttttgtgcaattggcaaatggagatttcaagggctttaaggtcaatggcagaaaaggaaatatcttcgtttcaaaactagacagaatcattcccacaaactgcgttgtgatgtgttcgttcaactcacagagtttaacctttctgttcatagagcagttaggaaacactctgtttgtaaagtctgtaagtggatattctgacatcttgtggccttcgttgggaacgggatttcttcatattctgctagacagaagaattctcagtaacttcccttgtgttgtgtgtattcaactcacagagttgaacgatcctttacacagagcagacttgaaacattctttttgtggaatttgcaagtggagatttcagccgctttgaggtcaatggtagaataggaaatatcttcatatagaaactagacagaatgattctcagaaactcctttgtgatgtgtgcgttcaactcacagagtttaacctttctgttcatagagctgttaggaaacactctgtttgtaaagtctgcaagtggatattcagacctccttgaggccttcgttggaaacgggatttcttcatattctgctagacagaagaattctcagtaacttccttgtgttgtgtgtattcaactcacagagttgaacgatcctttacagagagcagacttgaaacactctttttgtggaatttgcaagtggatatttcagccgctttgaggtcaatggtagaaaaggaaatatcttcgtataaagactagacagaatcattctcagaaactgctctgcgatgtgtgcgttcaactctcagagtttaacttttcttttcattcagcagtttggaaacactctgtttgtaaagtctgcacgtgaataatttgaccacttagaggccttcgttggaaacgggtttttttcatgtaaggctagacagaagaattcccagtaacttccttgtgttgtgtacattcaactcacagagttgaacgttcccttagacagagcagatttgaaacactctttttgtgcaattggcaagtggagatttcaagcgatttgaggtcaatggcagaaaaggaaatatcttcgtttcaaaactagacagaatcattcccacaaaatgcgttgtgatgtgttcgttcatctcacagagtttaacctttcttttcgtagagcagttaggaaacagtctgtttgtaaattctgtaagtggatattctgacatcctgtggccttcgttggaaacgggatttcttcatattctgctagacagaagaattctcagtaacttccttgtgttgtgtgtattcaactcacagagttgaacgatcctttacacagagcagacttgaaacactctttttgtgaaatttgcaagtggagatttcagccgctgtgagttcaatggtagaataggaaatatcttcctatagaaactagacagaatgattctcagaaactcctttgtgatgtgtgcgttcaactcacagagtttaacctttctgttcatagagctggtaggaaacactctgtttgtaaagtctgcaagtggatattcagacctccttgcggccttcgttggaaacgggatttcttcatattctgctagacagaagaattctcagtaacttctttgtgttgtgtgtattcaactcacagagttgaacgatcctttacacagagcagacttgaaacactctttttgtggaatttgcaagtggagatttcagccgctttgaggtcaatggtagaaaaggaaatatcttcgtataaagactagacagaatcattctcagaaactgctctgcgatgtgtgcgttcaactctcagagtttaacttttcttttctttcagcagtttggaaacactctgtttgtaaagtctgcacgtggatattttgaccacttagaggccttcgttggaaacgggtttttttcctgtaaggctagacagaagaattcccagtaacttccttgtgttgtgtacattcaactcacagagttgaacgttcccttagacagagcagatttgaaacactctttttgtgcaattggcaagtggagatttcaagcgctttgaggtcaatggcagaaaaggaaatatcttcgtttcaaaactagacagaatgattctcataaactcctttgtgatgtgtgcgttcaactcacagagtttaacctttcttttcatagagcagttaggaaacactctgtttgtaaagtatgcaagtggatattcagacctctttcaggccttcgttggaaacgggatttcttcatattatgctagacagaataattctcagtaacttccttgtgttgtgtgtattcaactcacagagttgaacgatcctttacagagagcagacttgtaacactctttttgtggaatttgcaagtggagatttcagccgctttgaggtcaatggtagaataggaaatatcttcctatagaaagtagacagaatgattctcataaactcctttgtgatgtgtgcattcaactcacagagtttcacctttcttttcatagagcagttaggaaacactctgtttgtaaagtctgcaagtggatattcagaccaccttgaggccttcgttggaaacgggatttcttcatattctgctagacagaagaaatcccagtaacttccatgtgttgtgtgtgttcaactcacagagttgaactttcatttacacagagcagatttgaaacactctttttgtggaatttgcaaatggagatttcaaactctttgaggccaaaggcagaaaaggaaatatcttcgtataaaaactagacagaatcattctcagaaactgctgcgtgatgtgtgcgttcaactctcagagtttaacttttgttttcattcagcggtttggaaacacactgtttgtaaagtctgcacgaggatatattgaccacttagaggccttcgttggaaacgggtttttttcatgtaaagctagacagaagaattcccagtaactttccttgtgttgtgtgcattcaactcacagagttgaacgttcccttagacagagcagatttgaaacacactatttgtgcaatttgcaagtgtagatttcaagcgctttaaggtcaatggcagaaaaggaaatatcttcgtttcaaaactagacagaatcattcccacaaactgcgttgtgatgtgttcgttcaactcacagagtttaacctttcttttcatagagcagttaggaaacagtctgtttgaaaattctgtaagtggatattctgacatcttgtggccttcgttggaaacgggatttcttcatattctgctagacagaagaattctcagtaacttccttgtgttgtgtgtattcaactcacagagttgaacgatcctttacacagagcagacttgaaacattctttttgtggaatttgcaagtggagatttcagacgctttgaggtcaatggtagaataggaaatatcttcctatagaaactagacagaacgattctcagaaactcctttgtgatgtgtgcgttcaactcacagagtttaacctttcttttcatagagcagttaagaaacactctgtttgtaaagtctgcaagtggatattcagacctctttgaggccttcgttggaaacgggatttcttcatattctgctagacagaagaattctcagtaacttccttgtgttgtgtgtattcaagtgacagagttgaactttcatttagagagagcagatttgaaacactgtttttgtggaatttgcaattggagatttcaagcgctttggggccaaaggcagaaaaggaaatatcttcgtataaaaactagacagaatcattctcagaaactgctgcgtgatgtgtgcgttcaactctcagagtttaacttttcttttcattcagcggtttggaaacactctctttgtaaagtctgcacgtggatattttgacctcttagaggccttcgttggaaacgggttttttttcatgtaaggctagacagaagaattcccagtaacttccttgtgttgtgtgcattcaactcacagagttgaatgttcccttagacagagcagatttgaaacactctatttgtgcaatttgcaagtgtagatttcaagcgctttaaggtcaatggcagaaaaggaaatatcttcgtctcaaaactagacagaatcattcccagaaactgcgttgtcatgtgttcgttcaactcacagagtttaacctttctgttcatagagcagttaggaaacactctgtttgtaaagtctgtaagtggatattctgacatcttgtggccttcgttggaaacgggatttcttcatattctgctagacagaagaattctcagtaacttccttgtgttgtgtgtattcaactcacagagttgaacgatcctttacacagagcagacttgaaacactctttttgtggaatttgcaagtggagatttcagccgctttgagatcaatggtagaaaaggaaatatcttcgtataaagactagacagaatgattctcagaaactccttttggatgtgtgcgttcaactcacagagtttaacctttcttttcatagagcagttaggaaacactctgtttgtaaagtctgcaagtggatattcagacctctttgaggccttcgttggaaaagggatttcttcattttatgctagacagaagaattctcagtaacttccttgtgttgtgtgtattcaactgacagagttgaactttcatttggagagagcagatttgaaacactgtttttgtggaatttgcaagtggagatttcaagcgctttgggaccaaaggcagaaaaggaaatatcttcgtataaaaactagacagaataattctcagaaactgctgcgtgatgtgtgcgttcaactctcagagtttaacttttcttttcattcagcggtttcgaaacactctgtaaagtctgcacgtggatattttgaccacttagaggccttcgttggaaacgggtttttttcatgtaaggctagacagaagaattcccagtaacttccttgtgttgtgtgcattcaactcacagagttgaacgttcccttagacagagcagatttgaaacactctatttgtccaatttgcaagtgtagatttcaagcgctttaaggtcaacggcagaaaaggaaatatcttcgtttcaaaactagacagaatcattcccacaaactgcgttgtgatgtgttcgttcaactcacagactttaacctttctgttcatagagcagttaggaaacactctgtttgtaaagtctgcaagtggatattcagacctccttgaggccttcgttggaaacgggatttcttcatattctgctagacagaagaattctcagaaacttccttgtgttgtgtaatttcaactcacagagttgaacgatgctttacacagagtagacttgaaacactctttttgtggaatttgcaagtggagatttcagccgctttgaggtcaatttttgaaaaggaaatatcttcgtataaaaactagacagaatgattctcagaaactcctttgtgatgtgtgtgttcaactcacagactttaacctttcttttcatagagcagttaggaaacactctgtttgtacagtctgcaagtggatattcagacatccttgaggctttcgttgaaaacgggatttcttcatattctgctagaaagaagaaattcccagtaacttccttgtgttgtgtgtgttcaactcacagcagttgaactttcatttacacagagcagattggaaacactctttttgtggaatttgcaaggggagatttcaagcgctttgaggccaaaggcagaaaaggaaatatcttcgtataaaaactagacagaatcattctcagaaactgctctgcgatgtgtgcgttcaactctcagagtttaacttttcttttcattcagcagtttggaaacactctgtttgtaaagtctgcacgtggatattttgaccacttagaggccttcgttggaaacggtttttttcctgtaaggctagacagaagaattcccagtaacttccttgtgttgtgtacattcaactcacagagttgaacgttcccttagacagagcagatttgaaacactctttttgtgcaattggcaagtggtgatttcagcctctttgaggtcaatggtagaaaaggaaatatcttcgtataaaaactagacagaacgattctcagaaactcctttgtgatgtgtgtgttcaactcacagagtttaacctttcttttcatagagcagttaggaaacactctgtttgtaaactctgcaagtggatattcagacctctttgaggccttcgttggaaacgggatttcttcctattctgctagacagaagaattctcagtaacttccttgtgttgtgtgtattcaactcaccgagttgaacgatcctttacacagagcagacttgaaacactccttttgtggaatttgcaagtggagatttcagctgctttcaggtcaatagtagaaaaggaaatatcttcgtagaaaaactagacagaatgattctcagaaactcctttgtgatgtgtacgttcaactcacagagtttaacctttgttttcatagagcagttaggaaacactctgtttgtaaagtctgcaagtggatattcagacctctttgaggccttcgttggaaacgggtttttttcatataaggctagactgaagaattctcagtaacttccttgtgttgtgtgtattcaactgacagagctgaactttcatttagagagagcagatttgaaacactgtttttgtggaatttgcaagtggagatttcaagcgctttggggccaaaggcagaaaaggaaatatccttcgtataaaaactagacagaatcattctcagaaactgctctgcgatgtgtgcgttcaactctcagagtttaacttttattttcattcagcagtttggaaacactctgtttgtaaagtctgcacgtggatattttgaccacttagaggccttcgttggaaacgggtttttttcctgtaaggctagacagaagaattcccagtaacttccttgtgttgtgtacattcaactcacagagttgaacgttcccttagacagagcagatttgaaacactctttttgtgcaattggcaaatggagatttcaagcgctttaaggtcaatggcagaaaaggaaatatcttcgtttcaaaactagacagaatcattcccacaaactgcgttgtgaagtgttcgttcaactcacagagtttaacctttcttttcatagagcagttaggaaacagtctgtttgtcaattctgtaagtggatattctgacatcttgtggccttcgttggaaacgggatttcttcatattctgctagacagaataattctcagtaacttctttgtgttgtgtgtattcaactcacagagttgaaggatcctttacagagagcaggcttgaaacactctttttgtcgaatttgcaagtggagatttcagccgctttgaggtcaatggttgaataggaaatatcttcttatagaaactagacagaatgattctgagaaactcctttgtgatgtgtgcgttcaactcacagagtttaacctttcttttcatagagcagttaggaaacactctgtttgtaaagtctgcaagtggatattcagatctccttgaggccttcgttggaaacgggatttcttcatattatgctagacagaagaattcccagtaacttcgttgtgttgtgtgtgttcaactcacagagttgaactttgatttacacagagcagatttgaaacactctttttgtggaatttgcaagtggagatttcaagcgatttgaggccaaaggcagaaaaggaaatatcttcgtataaaaactagacagaatcattctcagaaactgctctgcgatgtgtgcgtttaactctcagagtttaaattttcttttcattcagcagtgtggaaacactctgtttgtaaagtctgcacgtggatattttgaccacttagaggccttcgttggaaacgggtttttttcctgtaaggctagacagaagcattcccagtaacttccttgtgttgtgtgcattcaactcacagagatgaacgttcccttagacagagcagatttgaaacgctctatttgtgcaatttgcaagtgtagatttcaagcgctttaaggtcaatggcagaaaaggaaatatcttcgtttcaaaactagacagaatcattcccacaaactgcgttgtgatgtgttcgttcaactcacagagtttaacctttctgttcatagagcagttaggaaacactctgtttgtaaagtctgtaagtggatattctgacatcttgtggccttcgttggaaacggggtttcttcatattatgctagacagaagaattctcagaaacttctttgtgttgtgtgtatttaactcacagagttgaacgatcctttacacagagcagacttgaaacactctttttgtggaatttgcaagtggagatttcagccgctttgaggtcaacggtagaataggaaatatcttcctatagaaactagacagaatgattctcagaaactcctttgtgatgtgtgtgttcaactcacagagtttaacctttctattcatagagtagttaggaaacactctgtttgtaaagtctgcaagtggatattcagacctactttgaggccttcgttggaaacaggatttcttcatactatgctagacagaagaattcccagtaacttccttgtgttgtgtgtgttcaactcacagagttgaactttcatttacacagagcagatttgaaacactctttttgtggaatttgcaggtggagatttcaagcgctttgaggccaaaggcagaaaaggaaatatcttcgtataaaaactagacagaatcattctcagaaactgctctgcgatgtgtgcgttcaactctcagagtttaacttttcttttcattcagcagtttggaaacactctgtttctaaagtctacacgtggataatttgaccacttagaggccttcgttggaaacgggtttttttcatgtaaggctagacagaagaattcccagtaacttccttgtgttgtgtgcattcaactcacagagttgaacgttcccttagacagagcagatttgaaacactctatttgtgcaatttgcaagtgtagatttcaagcgctttaaggtcaatggcagaaaaggaaatatcttcgtttcaaaactagacagaatcattcccacaaactgcgttgtgatgtgttcgttcaactcacagagtttaacctttctgttcatagagcagttaggaaacactgtgttagtaaagtctgtaagtggatattctgacatcttgtggccttcgttggaaacgggatttcttcatattctgctagacagaagaattctcagtaacttccttgtgttgtgtgtattcaactcacagagttgaacgatcctttacacagagcagacttgaaacactctttttgtggaatttgcaagtggagatttcagccgcattgaggtcaatggtagaaaaggaaatatcttcgtataaaaactagacagaatgattctcagaaactcctttgtgatgtgtgcgttcaagtcacagagtttaacctttcttttcatagagcagttaggaaacactctgtttgtaaagtctgcaagtggatattcagacctctttgaggccttcgttggaaacgggatttcttcatattctgctagacagaagaattctcagtaacttccttgtgttgtgtgtattcaactgacagagttgaactatcatttagagagagcagatttgaaacactgtttttgtggaatttgcaagtggagatttcaagcgctttggggccaaaggcacaaaaggaaatatcttcgtataaaaactagacagaatcattctcagaaactgcagcgcgatgtgtgcgttcaactctcagagtttaacttttcttttcattcagcggtttggaaacactctgtttgtaaagtctgcacgtggaaattttgaccacttagaggccttcgttggaaacgggtttttttcatgtaaggctagacagaagaattcccagtaacttccttgtgttgtgtgcattcaactcacagagttgaacgttcccttagacagagcagatttgaaacactctatttgtgcaatttgcaagtgtagttttcaagctctttaaggtcaacggcagaaaaggaaatatcttggtttcaaaactagacagaatgattctcagaaactcctttgtgatgtgtgcgttcaactcacacagtttaacctttctttccatagagcagttaggaaacactctgtttgtaaagtctgcaagtggatattcagacctctttgaggccttcgttggaaacgggatttcttcatattctgctagacagaagaattctcaggaacttccttgtgttgtgtgtattcaactcacagagttgaacgatactttacacagagcagacttgaaacactctttttgtggaattcgcaagtggagatttcagccgctttgaggtcaatggtagaataggaaatatcttcctatagaaactagacagaatgattctcagaaactcctttgtgatgtgtgccttcaactcacagagtttaacctttcttttcatagagcagttaggaaacactctgcttgtaaagtctgcaagtggatattcagccctctttgaggccttcgttggaaacgggtttttttcatataaggctagacagaagaattctcagtaacttccttgtgttgtgtgtattcaactgacagagttgaactttcatttagagagagcagatttgaaacactgtttttgtggaatttccaatggagatttcaagcgctttggggtcaaaggcagaaaaggaaatatcttcgtataaaaactagacagaatcattctcagaaactgctctgtgatgtgtgcgttcaactctcagagtttaacttttcttttcattcagcagtttggaaacactctgtttgtaaagtctgcacgtggataatttgaccacttagaggccttcgttggaaaagggtttttttcatgtaaggctagacagaagaattcccagtaacttccttgtgttgtgtgcattcaactcacagagttgaacgttcccttagacagagcagatttgaaacactctatttgtgcaatttgcaagtgtagatttcaagcgctttaaggtcaatggcagaaaaggaaatttcttcgtttcaaaactagacagaatcattcccacaaactgcgttgtgatgtgttcgttcaactcacagcagtttaacctttctgttcatagagcagttaggaaacactctgtttgtaaagtctgtaagtggatattctgacatcttgtggccttcgttggaaacgggatttcttcatattctgctagacagaagaattctcagtaacttccttgtgttgtgtgtattcaactcacagagttgaacgatcctttacacagagcagacttgaaacattctttttgtggaatttgcaatggagatttcagccgctttgaggtcaatggtagaataggaaatatcttcctatagaaactagacagaatgattctcataaactcctttgtgatgtgtgcgttcaactcacagagtttaacctttcttttcatagagcagttaggaaacactctgtttgtaaagtatgcaagtggatattcagacctgcttgaggccttcgttggaaacgggatttcttcatattatgctagacagaagaattcccagtaacttccttgggttgtgtgtgttcaactcacagagttgaactttcgtttacacagagcagatttgaaacactctttttgtggaatttgcaggtggagatttcaagcgctttgaggccaaaggcagaaaaggaaatatcttcgtataaaaactagacagaatcattctcagaaactgctctgcgatgtgtgcgttcaactctcagagtttaacttttcttttcattcagcagtttagaaacactctgtttgtaaagtctgcacgtggataatttgaccacttagaggccttcgttggaaacgggtttttttcatgtaaggctagacagaagagttctcagtaacttccttgtgttgtgtgtattcaactcacacagttgaacgatcctttacacagagcagacttgtaacactctttttgtggaatttgcaagtggagatttcagccgctttgaagtcaaagtagaaaaggaaatatcttccaataaaaactagacagaatcattcccacaaactgcgttgtgatgtgttcgttcaactcacagagtttaaccgttcttttcatagagcagttaggaaacagtctgtttgtcaattctgtaagtggatattctgacatcttgtggccttcgttggaaacgggatttcttcatattctgctagacagaagaattctcagaaacttcgttgtgttgtgtgttttcaaatcacagagttcaacgatcctttacacagagtagacttgaaacactctttttgtggaattggcaaggtggagatttcagccgctttgaggtcaatggtagaataggaaatatcttcgtataaaaactagacagaatgattctcagaaactcctttgtgatgtgtgcgttcaactcacagtagtttaacctttcttttcatagagcagttaggaaacactctgtttgtaaagtctgcaagtggatattcagacctctttgaggccttcgttggaaacgggtttttttcatataaggctagacagaagaattcccagtaacttccatgtgttgtgtgtgttcaactcacagagttgaactttcatttacacagagcagatttgaaacactcattttgtggaatttgcaaatggagatttcaagcgctttgaggccaaaggcagaaaaggaaatatcttcgtataaaaattagacagaatcattctcagaaactgctctgcgatgtgtgcgttcaactctcagagtttaacttttcttttcattcagcagtttggaaacactctgtttgtaaattctgcacgtggataatttgaccacttagaggccttcgttggaaacgggtttttttcctgtaaggctagacagagaagattcccagtaacttccttgtgttgtgtacattcaactcacagagttgaacgttcccttagacagagcagatttgaaacactctttttgtgcaattggcaagtggagatttcaagcgctttaaggtcaatggcagaaaaggaaatatcttcgtttcaaaactagacagatcattcccacaaactgcgttgtgatgtgttcgttcaactcacagagtttaacctttcttttcatagagcagttaggaaacagtctgtttgaaaattctgtaagtggatattctgacatcttgtggccttcgttggaaacgggatttcttcatattctgctagacagaagaattctcagtaacttccttgtgttgtgtgtattcaactcacagagttgaacgatcctttacacagagcagacttgtaaaacttttttgtggaatttgcaagtggagatttcagccgctttgaagtcaaaggtagaaaaggaaatatcttcctataaaaactagacagaatgattctcagaaactcctttgtgatgtgtgtgtccaactcacagagtttaacctttcttttcatagagcagttaggaaacactctgtttgtaaagtctgcaagaggatattcagacctctttgaggccttcgttggaaacgggattttttcatataaggctagacagaagaattctcagtaacttccttgtgttgtgtgttttcaactgacagagttgaactttcatttggagagagcagatttgaaacactgtttttgtggaatttgcaagtggagatttcaagcgctttggggccaaaggcagaaaaggaaatatcttcgtataaaaactagacagaatctttctcagaaactgctctgcgatgtgtgcgttcaactctcagagtttaacttttcttttcattcagcagtttggaaacactctgtttgtaaagtctgcacgtggatattttgaccacttagaggccttcgttggaaacgggtttttttcctgtaaggctagacagaagaattctcagtaactttccttgtgttgtgtgtattcaactcacagagttgaacgatcctttacacagagcagacttgagacactctttttgtggaatttgcaagtggagatttcagccgctttgaggtcaatggtagaaaaggaaatatcttcgtataaaaactagacagaatgattctcagaaacttcattgtgatgtgtgcgttcaactcacagagtttaacctttcttttcatagagcagttaggaaacactctgtttgtaaagtctgcaagtggatattcagacctctttgaggccttcgttggaaacgggatttcttcatactgtgctagacagaagaattctcagtaacttccttgtgttgtgtgtattcaactcacagagttgaacgatcctttagagagagcggacttgaaacactctttttgtggaatttgcaagtggagatttcagccgcgttgaggtcaatgatagaaaaggaaatatcttcgtataaaaactagacagaatgattctcagaaactcctttgtgatgtgtgcgttcaactcacagagtttaacctttcttttcatagagcagttaggaaacactctgtttgtaaagtctgcaagtggatactcagacctctttgaggccttctttggaaacggcatttcttcatattatgctagacagaagaattcccagtaacttccttgtgttgtgtgtgttcaactcatagagttgaactttcatttacacagagcagatttgaaacactctttttgtggaatttgcaaatggagatttcaagcgctttgaggccaaaggcagaaaaggaaatatcttcgtataaaaactcgacagaatcattctcagaaactgctctgcgatgtgtgcgttcaactctcagagtttaacttttcttttcattcagcagtttggaaacactctgtttgtaaagtctgcatgtggaaaacttgaccacttagaggccttcgttggaaacgggtttttttcatgtaaggctagacagaagaattcccagtaacttccttgtgttgtgtgcattcaactcacagagatgaacgttcccttagacagagcagatttgaaacactctatttgtgcaatttgcaagtgtagatttcaagcgctttaaggtcaatggcagaaaaggaaatatctttgtttcaaaactagacagaatcattcccacaaactgcgttgtgatgtgttcgttcaactcacagagttttacctttctgttcatagagcagttaggaaacactctgtttgtaaagtctgtaagtggatattctgacatcttgtggccttcgttggaaaagggatttcttcatattctgctagacagaagaattctcagaaacttccttgtgttgtgtgttttcaactcacagagttgaacgacgctttacacagagtagacttgaaacactctttttgtgtaatttgcaagtggagatttcagccgctttgaggtcaatggtagaaaaggaaatatcttcgtataaaaactagacagaatgattctcagaaactcctttgtgatgtgtgcgttcaactcacagagtttaacctttcttttcatagagcagttaggaaacactctgtttgtaaagtctgtaagtggatattcagacctctttgaggccttcgttggaaacgggatttcttcgtattctgctagacagaagaattcccagtaacttccttgtgttgtgtacattcaactcacagagttgaactttgatttacacagagcagatttgaaacactctttttgtggaatttgcaagtggagatttcaagcgctttgaggccaaaggcagaaaaggaaatatcttcgtataaaaactagacagaatcattctcagaaactgctctgcgatgtgtgcgttcaactctcagagtttaacttttcttttcattcagcagtttggaaacactctgtttgtaaagtctgcacgtcgatattttgaccacttagaggccttcgttggaaacgggtttttttcctgtaaggctagacagaagaattcccagtaacttccttgtgttgtgtgcattcaactcacagagttgaacgttccattagacagagcagatttgaaacactctatttgtgcaatttgcaagtgtagatttcaagcgctttaaggtcaatggcagaaaaggaaatatcttcgtttcaaaactagacagaatcattcccacaaactgcgttgtgatgtgttcgttcaactcacagcagtttaacctttctgttcacagagcagtgaggaaacactctgtttgtaaactctgtaagtggatattctgacatcttgtggccttcgttggaaaagggatttcttcatattctgctagacagaaggattctcagtaacttccttgtgttgtgtgtattcaactcacagagttgaacgatcctttacacagagcagacttgaaacactctttttgtggaatttgcaagtggagatttcagccgctttgaggtcaatagtagaaaaggagatatcttcgtataaaaactagacagaatgattctcagaaactcctttgtgatgtgtgcgttcaactcacagagtttaacctttcttttcatagagcagttaggaaacactctgtttgtaaagtctgcaagtggatattcagacctccttcaggccttcgttggaaacgggattttttcatataaggctagacagaagaattcccagtaacttccttgtgttgtgtgtgttcaactcacagagttgaactttcatttacacagagcagatttgaaacactctttttgtggaatttgcaaatggagatttcaagcgctttgaggccaaaggcagaaaaggaaatatctttctataaaaactagacagaatcattctcagaaactgctgcgtgatgtgtgcgttcaactctcagagtttaacttttcttttcattcagcggtttggaaacactctgtttgtaaagtctgcacgtggaaattttgaccacttagaggccttcgttggaaacgggtttttttcatgtaaggctagacagaagaattcccagtaacttccttgtgttgtgtgcattcaactcacagagttgaacgttcccttagacagagcagatttgaaacactctatttgtgcaatttgcaagtgtagttttcaagctctttaagatcaacctgcagaaaaggaaatatcttcgtttcaaaactagacagaatcattcccacaaactgcgttgtgatgtgttcgttcaactcacagagtttaacctttctgttcacagagcagttaggaaacactctgtttgtaaagtctgtaagtggatattctgacatcttgtggccttcgttggaaacgggatttcttcatattctgctagacagaagaattctcagtaacttccttgtgttgtgtgtattcaactcacagagttgaacgatcctttacacagagcagacttgaaacactctttttgtggaatttgcaagtggagatttcagccgcgttgaggtcaatgttagaaaaggaaatatcttcgtataaaaactagacagaatgattctcagaaactcctttgtgatgtgtgcgttcaactcacagagtttaacctttcttttcatagagcagttaggaaacactctgtttgtaaagtatgcaagtggatattcagacctgcttgaggccttcgttggaaacgggatttcttcatattatgctaggcagaagaattctcagtaacttccttgtgttgtgtgtattcaactgacagagttgaactttcatttagagagagcagatttgaaacactgtttttgtggaatttgcaagtggagatttcagccgctttgaggtcaatagtagaaaaggaaatatcttcgtagaaaaactagacagaatgattctcagaaactcctttgtgatgtgggcgttgaactcacagagtttaacctttcttttcatagagcagttaggaaacactctgtttgtaaagtctgcacatggatattttgaccacttagaggccttcgttggaaacgggtttttttcatgtatggctagacagaagaattcccagtaacttccttgtgttgtgtgcattcaactcacagagttgaacgttcccttagacagagcagatttgaaacactctatttgtgcaatttccaagtgtagatttcaagcgctttaaggtcaacggcagaaaaggaaatatcttcgtttcaaaactagacagaatcattcccacaaactgcgttgtgatgtgttcgttcaactcacagtgtttaacctttctgttcatagagcagttaggaaacactctgtttgtaaagtctgtaagtggatattctgacatcttgtggccatcgttggaaacgggatttcttcatattctgctagacagaagaattcccagtaacttccttgtgttgtgtgcattcaactcacagagttgaacgatcctttacacagagcagacttgaaacacactttttgtggaatttgcaagtggagatttcagccgctttgaggttaatggtagaaaatgaaatatcttcgtatagaaactagacagaatgattctcagaaactcctttgtgatgtgtgcgttcaactcacagagtttaacctttcttttcatagagcagttaggaaacactctgtttgtaaagtctgcaagtggatattcagacatccttgaggctttcgtttgaaacgggatttcttcatattctgctagaaagaagaattcccagtaacttccttgtgttgtgtgtgttcaactcacagagttgaactttcatttacacagagcagatttgaaacactctttttgtggaatttgcaagtggagatttcaagcgctttggggccaaaggcagaaaaggaaatatcttcgtttcaaaactagacagaatcattctcagaaactgctctgcgatgtgtgcgttcaactctcagagtttaacttttcttttcattcagcagtttggaaacactctgtttgtaaagtctgcacgtggatattttgaccacttagaggccttctttggaaacgggtttttttcctgtaaggctagacagaagaattcccagtaacttccttgtgttctgtacattcaactcacagagttgaacgttcccttagacagagcagatttgaaacactctttttgtgcaattggcaagtggagatttcaagcgctttaaggtcaatggcagaaaaggaaatatcttcgtttcaaaagtagacagaatcattcccacaaactgcgttgtgatgtgttcgttcaactcacagagtttaacctttctgttcatagagcagttaggaaacactctctttgtaaagtctgtaagtggatattctgatatcttgtggccttcgttggaaacgggatttcttcatattctgctagacagaagaattctcagtaacttcccttgtgttgtgtgtattcaactcacagagttgaacgatcctttacagagagcagacttgaaacactctttttgtggaatttgcaagtggagatttcagccgctttgaggtcaatggtagaaaaggaaatatcttcgtataaagaatagacagaatgattctcagaaacttctttgtgatgtgtgcgttcaactcacagagtttaacctttcttttcatagagcagttaggaaacactctgtttgtaaagtctgcaagtggatattcagacctctttaaggccttcgttggaaacgggtttttttcatataaggctagacagaagaattcccagtaacttccttgtgttgtgtgtgttcaactcacagagttgaactttcattttcacagagcagatttgaaacactctttttgtggaatttgcaaatggagatttcaagcgctttgaggccaaaggcagaaaaggaaatatcttcgtataaaaactagacagaatcattctcagaaactgctgcgtgatgtgtgcgttcaactctcagagtttaacttttcttttcattcagcggtttggaaacactctgtttgtaaagtctgcacgtggaaattttgaccacttagaggccttcgttggaaacgggattttttcatgtaaggctaggcagaagaattcccagtaacttccttgcgttgtgtacattcaactcacagagttgaacgttcccttagacagagcagatttgaaacactctttttgtgcaattggcaagtggagatttcaagcgctttaaggtcaatggcagaaaaggaaatatcttcgtttcaaaactagacagaatcattcccacaaactgcgttgtgatgtgttcgttcaactcacagagtttaacctttctgttcatagagcagttaggaaacactctgtttgtaaagtctgtaagtggatattctgaaatcttgtggccttcgttggaaacgggatttcttcatattgtgctagacagaagaattctcaataacttccttgtgttgtgtgtattcaactcacagagttgaacgatcctttacacagagcggacttgaaacactcgttttgtggaatttgcaagtggagatttcagccacgttgaggtcaatggtagaaaaggaaatatcttcgtataaaaactagacagaatgattctcagaaactcctttgtgatgtgtgcgttcaactcacagagttcaacctttcttttcatagagcagttgggaaacactctgtttgtaaagtctgcaagtggatattcagacttccttgaggccttcgttggaagcgggatttcttcatattctgctagacagaataattctcagtaacttccttgtgttgtgtttattcaactaacagagttgaactttcatttggagagagcagatttgaaacactgtttttgtggaatttgcaagtggagatttcaagcgctttggggccaaaggcagaaaaggaaatatcttcgtataaaaactagacagaatcattctcagaaactgctctgcgatgtgtgcgttcaactctcagagtttaacttttcttttcattcagcagtttggaaacactctgtttgtaaagtctgcacgtggatattttgaccacttagaggccttcgttggaaacgggttttttcctgtaaggctagacaaaagaattcccagtaacttccttgtgttgtgtacattcaactcacagagttgaacgttcccttagacagagcagatttgaaacactctttttgtgcaattggcaagtggagatttcaagcgctttaaggtcaatggcagaaaaggaaatatcttcgtttcaaaactagacagaatgattctcagaaactcctttgtgatgtgtgcgttcaactcacagagtttaacctttcttttcatagagcagttaggaaacactctgtttgtaaagtctgcaagtggatatgcagacttctttgaggccttcgttggaagcgggattgcttcatattctgctatacagaagaattctcagtaacttccttgtgttgtgtgtattcaactcacagagttgaacgatcctttacacagagcagacttgaaacactctttttttggaatttgcaagtggagatttcacccgctttgaggtcaatggtagactaggaaatatcttcctatagaaactagacagaaatgattctcagaaactcctttgtgatgtgtgcgttcaactcacagagtttaacctttcttttcatagagcagttaggaaacactctgtttgtaaagtctgcaagtggatattcagacctctttgaggccttcgttggaaacgggatttcttcatattctgctagacagaagaattctcagtaacttccttgtgttgtgtgtattcaactgacacagttgaactttcatttagagagagctgatttgaaacactgtttttgtggaatttgcaagtggagatatcaagcgctttggggccaaaggcagaaaaggaaatatcttcgtataaaaactagacagaatcattctcagaaactgctgcgtgatgtgtgcgttcaactctcagagtttaacttttcttttcattcagcggtttggaaacactctgtttgtaaagtctgcacgtggatattttgaccacttagaggccttcgttggaaacgggtttttttcatgtaaggctagacagaagaattcccagtaacttccttgtgttgtgtgcattcaactcacagagttgtacgttcccttagacagagcagatttgaaacactctatttgtgcaatttgcaagtgtagatttcaagcgctttaaggtcaatggcagaaaaggaaatatcttcgtttcaaaactagacagaatcattcccacaaactgcgttgtgatgtgttcgttcaactcacagagtttaacctttctgttcatagagcagttaggaaacactctgtttgtaaagtctgcaagtggatattcagacctccttgaggccttcgttggaaacgggatttcttcatattctgctagacagaagaattctcagtaacttccttgtgttgtgtgtattcaactcacagagttgaacgatcctttacacagagcagacttgaaacactctttttgtggaatttgcaagtagagatttcagccgctttgaggtcaatggtagaaaaggaaatatcttcgtataaagactagacagaatgattctcagaaactcctttgtgatgtgtgcgatcaactcacagagtttaacctttcttttcatagagcagttaggaaacactctgtaaagtctgcaagtggatattcagacatccttgaggctttcgttggaaacgggatttcttcatattctgctagaaagaagaattctcagtaacttccttgtgttgtgtgtattcaactcagagttgaacgatcctttacacagagcagacttgaaacactctttttgtggaatatgcaagtggagatttcagccgctttgaggtcaatgttagaataggaaatatcttcctatagaaactagacacaatcattctcagaaactgctctgcgatgtgtgcgttcaactctcagagtttaacttttcttttcattcagcagtttggaaacactctgtttgtaaagtctgcacgtggataatttgaccacttagaggccttcgttggaaacgggtttttttcatgtaaggctagacagaagaattcccagtaacttccttgtgttgtgtgcattcaactcacagagttgaacgttcccttagacagagcagatttgaaacactctatttgtgcaatttgcaagtgtagatttcaagctctttaaggtcaacggcagaaaaggaaatatcttcgtttcaaaactagacagaatcattcccacaaactgcgttgtgatgtgttcgttcaactcacagagtttaacctttcttttcatagagcagttaggaaacagtctgtttgtaaattctgtaagtggatattctgacatgttgtggccttcgttggaaacgggatttcttcatattctgctagacagaagaattctcagtaacttccttgtgttgtgtgtattcaactcacagagttgaacgatcctttacacagagcagacttgaaacattctttttgtggaatttgcaaatggagatttcagccgctttgaggtcaatggtagaataggaaatatcttcctatagaaactagacagaatgattctcagaaactcctttgtgatgtgtgcgttcaactcacagagtttaacctttcttttcatagagcagttagtaaacactctgtttataaagtctgcaagtggatattcagacccctttgaggccttcgttggaaacgggatttcttcatattatgctagacagaagaattctcactaacttccttctgttgtgtgtattcaactgacagagttgaactttcatttagagagagcagatttgaaacactgtttttgtggaatttgcaagtggagatttcaagcgctttcgggccaaaggcagaaaaggaaatatcttcgtataaaaactagacagaaatcattctcagaaactgctctgcgatgtgtgcgttcaactctcagagtttaacttttcttttcattcagcagtttggaaacactctgtttgtaaagtctgcacgtggatattttgaccacttagaggccttcgttggaaacgggtttttttcctgtaaggctaaacagaagaattctcagtaacttccttgtgttgtgtgtattcaactcacagagttgaacgatcctttacacagagcagacttgaaacactctttttgtggaatttgcaagtggagatttcagccgctttggggtcaatggtagaataggaaatatcttcctatagaaactagacagaatgattctcagaaactcctttgtgatgtgtgcgttcaactcacagagtttaacctttcttttcatagagcagttaggaaacactctttttgtaaagtctgcaagtggaaattcagacatccttgaggctttcgttggaaacgggatttcttcatgttctgctagaaagaagaattctcagtaacttccttgtgttgtgtgtattcaactcacagaggtgaacgatcctttacacagagcagacttgaaacactctttttgtggaatttgcaagtggagatttcagccgctttgaggtcaatggtagaaaaggaaatatcttcgtataaagactagacagaatgattctcagaaactcgtttgtgatgggtgcgttcaactcacagagattaacttttcttttcatagagcagttaggaaacactctgtttgtaaagtctgcaagtggatattcagacctctttgtggccttcgttggaaacgggatttcttcatattatgctagacagaagaattcccagtaacttcccttgtgttgtgtgcattcaactcacagagttgaacgttcccttagacagagcagatttgaaacactctatttgtgcaatttgcaagtgtagatttcaagcgcattaaggtcaatggcagaaaaggaaatatcttcgtttcaaaactagacagaatcattcccacaaactgcgttgtgatgtgttcgttcaactcacagagtttaacctttcttatcatagagcacttaggaaacagtctgtttgtaaattctgtaagtggatattctgacatcttgtggccttcgttggaaacgggatttcttcatattctgctagacagaagaattcccagtaacttccttgtgttgtgtgcattcaactcacagagttgaacgttcccttagacagagcagatttgaaacactctatttgtgcaatttgcaagtgtagttttcaagctctttaaggtcaacggcacaaaaggaaatatcttcgtttcaaaactagacagaatcattcccacaaacagcgttgtgatgtgttcgttcaactcacagagtttaacctttcttttcatagagcagttaggaaacagtctgtttgtcaattctgtaagtggatattctgacatcttgtggccttcgttggaaacgggatttcttcatattctgctagacagaagaattctcagtaactttccttgtgttgtgtgtattcaactcacagagttgaacgatcctttacacagagcagacttgaaacactctttttgtggaatttgcaagtggagatttcagccgctttgagttcaatggtagaataggaaatatcttcctatagaaactagacagaatgattctcagaaactcctttgtgatgtgtgcgttcaactcacagagtttaacctttcttttcatagaccagttaggaaacactctgtttttatagtctgtaagtggatattcagacatctttgaggccttcgttggaaacgggatttcttcatattctgctatacagaagaattctcagtaacttccttgtgttgtgtgtattcaactgacagagttgaacattcatttagagagagcagatttgaaacactgtttttgtggaatttgcaagtggagatttcaagcgctttggggccaaaggcagaaaaggaaatatcttcgtataaaaactagacagaatcattctcagaaactgctgcgtgatgtctgcgttcaactctcagagtttaacttttcttttcattcagcggtttggaaacactctctttgtaaagtctgcacgtggatattttgacctcttagacgccttcgttggaaacgggttttcttcatgtaaggctagacagaagaattcccagtaacttccttgtgttgtgtgcattcaactcacagagttgaacgttcccttagacagagcagatttgaaacactctatttgtgcaatttgcaagtgtagatttcaagcgctttaaggtcaatggcagaaaaggaaatttcttcttttcaaaactagacagaaatcattcccacaaactgcgttgtgatgtgttcgttcaactcacagagtttaacctttctgttcatagagcagttaggaaacactctgtttgtaaagtctgtaagtggatattctgacatcttgtggccttcgttgggaacgggatttcttcatattctgctagacagaagaattctcagtaacttccttgtgttgtgtgtattcaactcacagagttgaacgatcctttacacagagcagacttgaaacactctttttgtggaatttgcaagtagagatttcagccgctttgaggtcaatggtagaataggaaatatcttcctatagaaactagacagaatgattctcataaactcctttgtgatgtgtgcgttcaactcacagagtttaacttttcttttcatagagcagttaggaaacactctgtttgtaaagtctgcaagtggatattcagacctctttgaggccttcgttggaaacgggatttcttcatattctgctagacagaagaattcccagtaacttccttgtgttgtgtgtgttcaactcacagagttgaactttcatttacacagagcagatttgaaacactctttttgtggaagttgcaagtggagatttcaagcgctttgaggccaaaggcagaaaaggaaatatcttcgtttcaaaactagacagaatcattctcagaaactgctctgcgatgtgtgcgttcaactctcagagtttaacttttcttttcattcagcagtttggaaacactctgtttgtaaagtctgcacgtggagaatttgaccacttagaggccttcgttggaaacgggtttttttcatgtaaggctagacagaagaattcccagtaactcccttgtgttgtgtacattcaactcacagagttgaacgttcccttagacagagcagatttgaaacactctttttgtgcaattggcaaatggagatttcaagcgctttaaggtcaatggcagaaaaggaaatatcttcgtttcaaaactagacagaatcattcccacaaactgcgttgtgatatgttcgttcaactcacagagtttaacctttcttttcatagagcagttaggaaacagtctgtttgtaaattctgtaagtggatattctgacatcttgtggccttcgttggaaacgggatttcttcacattctgctagacagaagaattctcagtaacttccttgtgttgtgtgtattcaactcacagagttgaacgatcctttacacagagcagacttgaaacactctttttgtggaatttgcaggtggagatttcagccgctttgtgttcaatggtagaataggaaatatcttcctatagaaactagacagaatgattctcagaaaatcctttgtgatgtgtgcgttcaactcacagagtttaacctttcttttcatagagcagttaggaaacactctgtttgtaaagtctgcaagtggatattcagacaactttgaggctttcgttggaaacgggatttcttcatattctgctatacagaagaattctcagtaacttccttgtgttgtgtgtattcaactgacagagttgaactttcatttagacagagcagattagaaacactctttttgtggaatttgcaagtggagatttcaagggctttgaggccaaaggcagaaaaggaaatatcttcgtataaaaactagacagaatcattctcagaaactgctctgcgatgtgtgcgttcaactctcagagtttaacttttcttttcattcagcagtttggaaacactctgtttgtaaagtctgcacgtggataacttgaccacttagaggccttcgttggaaacggttttttttcatgtaaggctagacagaagaattctcagtaacttccttgtgttgtgtgtattcaactgacagagttgaactttcatttagagagagcagatttgaaacactgtttttgtggaatttgcaagtggtgatttcaagcgttttggggccaaaggcagaaaaggaaatatcttcgtataaaaactagacagaatcattctcagaaactgctctgcgatgtgtgcgttcaactctcagagtttaacttttcttttcattcagtagtttggaaacactctgtttgtaaagtctgcacgtggataatttgaccacttagaggccttcgttggaaacgggtttttttcatgtaaggctagacagaagaattctcagtaacttccttgtgttgtgtgtattcaactcacagagttgaacgatcgtttacacagagcagacttgagacactctttttgtggaatttgtaagtggagatttcagccgctttgtggtcattggtagaaaaggaaatatcttcatataaaaactagacagaatgattctcagaaactcctttgtgatgtgtgcgttcaactcacagagtttaacctttcttttcatagagcagttaggaaacactctgtttgtaaagtctccaagtggatattcagacctctttgaggccttcgttggaaacgggttttttcatataaggctagacagaagaattcccagtaacttccttgtgttgtgtgtgttcaactcacagagttgaactttcatttacacagagcagatttgaaacactctttttgtggaatttgcaagtggagatttgaagcgctttgaggccaaaggcagaaaaggaaatatcttcgtataaaaactagacagaatcattctcagaaactgctgcgtgatgtgtgcgttcaactctcagagtttaacttttcttttcattcagcggtttggaaacactctgtttgtaaagtctgcacgtggaaattttgaccacttagaggccttcgttggaaacgggattttttcatgtaaggctaggcagaagaattcccagtaacttcccttgtgttgtgtgcattcaactcacagagttgaacgttcccttagacagagcagatttgaaaaactctatttgtgcaatttgcaagtgtagatttcaagcgctttaaggtcaatggcagaaaaggaaatatcttcgtttcaaaactagacagaatcattcccacaaactgcgttgtgatgtgttcgttcaactcacagagtttaacctttctgttcatagagcagttaggaaacactctgtttgtaaagtctgaaagtggatattctgacatcttgtggccttcgttggaaacgggatttcttcatattctgctagacagaagaattctcagtaacttccttgtgttgtgtgtattcaactcacagagttgaacgatcctttacacagagcagacttgaaacactctttttgtggaatttgcaagtggagatttcagccgctttgaggtcaacggtagaaaaggaaatatcttcgtataaagactagacagaatgattctcagaaacttctttgtgatgtgtgcgttcaactcacagagtttaacctttcttttcatagagcagttaggaaacactctgtttgtaaactctgcaagtggatattcagacctctttgaagccttcgttggaaacgggatttcttcatactatgctagacagaagaattctcagtaacttctttttgttgtgtgtattcaactcacagagttgaacgatcctttacacagagcagacttgaaacactcgttttgtggaatttgcaagtggagatttcagccgcgttgaggtcaatggtagaaaaggaaatatcttcgtataaaaactagacagaatcattctcagaaactgctctgcgatgtgtgcgttcaactctcaagagtttaactttgcttttcattcagcagtttggaaacactctgtttgtaaagtctgcacgtggataatttgaccacttagaggccttcgttggaaacgggtttttttcatgtaaggctagacagaagaattcccagtaacttccttgtgttgtgtacattcaactcacagagttgaacgatcctttacacagagcagacttgtaacactctttttgtggaatttgcaagtggagatttcagccgctttgaagtcaaaggtagaaaaggaaatatcttcctataaaaactagacagaaagattctcagaaactcctttgtgatgtgttcgttcatctcacagagtttaacctttcttttcatagagcagttaggaaacagtctgtttgtaaattctgtaagtggatattctgacatcttgtggccttcgttggaaacgggatttcttcatattctgctagacagaagaattctcagtaacttccttgtgttgtgtgtattcaactcacagagttgaacgatcctttacacaaagcagacttgaaacactctttttgtggaatttgcaagtggagatttcagccgctttgaggtcaatggtagaaaaggaaatatcttcgtataaagactagacagaatgattctcagaaactcttttgtgatgtgtgcgttcaactcacagagtttaacctttctgttcatagagctggtaggaaacactctgtttgtaaagtctgcaagtggatattcagacctccttgaggccttcgttggaaacgggatttcttcatattctgctagacagaagaattctcagaaacttccatgtgttgtgtgttttcaactcacagagttgaacgatgctttacacagagtagacttgaaacactctttttgtgtaatttgcaagtggagatttcagccgctttgaggtcaatggtagaaaaggaaatatcttcgtataaaaactagacagaatgattctcagaaacttctttgtgatgtgtgcgttcaactcacagagtttaacctttcttttcatagagcagttaggaaacactctgtttgtaaactctgcaagtggatattcagacctctttgaggccttcgttggaaacgggatttctccatactgtgctagacagaagaattctcagtaactaccttgtgttgtgtgtattcaactcacagagttgaacgatcctttacacagagcggacttgaaacactcgttttgtggaatttgcaagtggagatttcagccgcgttgaggtcaatggtagaaaaggaaatgtcttcgtataaaaactagacagaatcattctcagaaactgctctgcgatgtgtgcgttcaactctcagagtttaactttgcttttctttcagcagtttggaaacactctgtttgtaaagtctgcacgtggataatttgaccacttagaggccttcgttggaaacgggtttttttcatgtaaggctagacagaagaattcccagtaacttccttgtgttgtgtgcattcaactcacagagttgaacgttcccttagacagagcagatttgaaacactctatttgtgcaatttgcaagtgtagatttcaagcgcattaaggtcaatggcagaaaaggaaatatcttcgtttcaaaattagacagaatcattcccacaaactgcgttgtgatgtgttcgttcaactcacagagtttaacctttcttttcatagagcagttaggaaacactctgttgtaaattctgtaagtggatattctgacatcttggggccttcgttggaaacgggatttcttcatattctgctagacagaagaatgctcagtaacttccgcgtgttgtgtgtattcaactcagagagttgaacgatcctttacacagagcagacttgaaacactctttttgtggaatttgcaagtggagatttcagccgctttgaggtcaatggtagaaaaggaaatatcttcctataaaaactagacagaatgattctcagaaactcctttgtgatgtgtgtgttcaactcacagagtttaacctttctattcatagagtagttaggaaacactctgtttgtaaagtctgcaagtggatattttgacctctttgaggccttcgttggaaacgggtttttttcatgtaaggctagacagaagaattcccagtaacttccttgtgttgtgtgtgttcaactcacagagttgaactttcatttacacagagcagatttgaaacactctttttgtggaatttgcaagtggagatttcaagcgatttgaggccaaaggcagaaaaggaaatatcttcgtataaaaacgagacagaatcatgctcagaaactgctctgcgatgtgtgcgttcaactctcagagtttaacttttcttttcattcagcagtttggaaacactctgtttgtaaagtctgcacgtgcataatttgaccgcttagaggccttcgttggaaacgggtttttttcatgtaaggctagacagaagaattcccagtaactttccttgtgttgtgtgcattcaactcacagagttgaacgttcccttagacagagcagatttgaaacactctatttgtgcaatttgcaagtgtagatttcaagcgctttaaggtcaatggcagaaaaggaaatatcttcgtttcaaaactacacagaatcattcccacaaactgcgttgtgatgtgttcgttcaactcatagagtttaacctttctgttcatagagcagttaggaaacactctgtttgtaaagtctgtaagtggatattctgacctcttgtggccttcgttggaaacgggatttcttcatattctgctagacagaataattctcagtaacttccttgtgttgtgtgtattcaactcacagtagttgaaggatcctttacagcgagcaggcttgaaacactctttttgtcgaatttgcaagtggagatttcagccgctttgaggtcaatggtagaataggaaatatcttcttatagaaactagacaaaatgattctcataaactcctttgtgatgtgtgcgttcaactcacagagtttaacctttcttttcatagagcagttaggaaacactctgtttgtaaagtctgcaagtggatattcagacctctttgagaccttcgttggaaacgggatttcttcatattctgctagacagaagaattctcagtaacttccttgtgttgtgtgtattcaactgacagagttgaactttcatttagagggagcagatttgagacactgtttttgtggaatttgcaattggagatttcaagcgcttcggagccaaaggcagaaaaggaaatatcttcgtataaaaactaggcagaaccattctcagaaactgctgcgtgatgtgtgcgttcaactctcagagtttaacttttcttttcattcagcggtttggaaacactctgtttgtaaagtctgcacgtggatattttgaccacttagaggccttcgttggaatcgggtttttttcatgtaaggctagacagaagaattctcagaaacttccttgtgttgtgtgttttcaactcacagagttgaacgatgctttacacagagtagacttgaaacactctttttgtgtaatttgcaagtagagatttcagccgctttgaggtcaacggtagaaaaggaaatatcttcgtataaaaactagacagaatgattctcagaaactcctttgtgatgtgtgcattcaactcacagagtttaacctttcttttcatagaacagttaggaaacactctgtttgtaaagtctgcaagtggatattcagacctctttgaggccttcgttggaaacgggatttcttcatattatgctagacagaagaattctcagtaacttccttgtgttgtgtgtattcaactcacagagttgaacgatcctttacacagagcagacttgaaacactctttttgtggaaattgcaagtggagatttcagccgctttgaggtcaatggtagaaaaggaaatatcttcgtataaaaactagacacaatgattctcagaaactcctttgtgatgagtgcgttcaactcacagattttaacctttcttttcatagagcagttaggaaacactctgtttgtaaagtctgcacgtggatattttgacctctttgaggccttccgtggaaacgggattttttcatataaggctagacagaagaattctcagtaacttccttgtgttgtgtgtattcaactcacagagttgaactttcatttacacagagcagatttgaaacactctttttgtggaatttgcaaatggagatttcaagcgctttgaggccaaaggcagaaaaggaaatatcttcttataaaaactagacagaatcattctcagaaactgctctgcgatgtgtgcgttcaactctcagagtttaacttttcttttcattcagcagtttgtaaacactctgtttgtaaagtctgcacgttgataatttgaccacttagaggccttcgttggaaacgggtttttttcatataaggctagacagaagaattcccagtaacttccttgtgttgtgtacattcaactcacagagttgaacgttcccttagacagagcagatttgaaacactctttttgtgcaattggcaaatggagatttcaagcgctttaaggtcaatggcagaaaaggaaatatcttcgtttcaaaactagacagaatgattctcagaaagtcctttgtgatgtgtgcgttcaactcacagagttcaacctttcttttcatagagcagttgggaaacactctgtttgtaaagtctgcaagtggatattcagacttctttgaggccttcgttggaagcgggatttcttcatattctgctagacagaagaattctcagtaacttccttgtgttgtgtgtattcaactcacagagttgaacgatcctttacacagagcagacttgaaacactctttttgtggaatttgcaattggagatttcagccgctttgaggtcaatggtagaataggaaatatcttcctatagaaactagccagaatgattctcagaaactcctttgtgatgtgtgcgttcaactctcagagtttaacttttcttttcattcagcaggttggaaacactctgtttgtaaagtctgcacgtggataatttgaccacttagaggccttcgttggaaacgggtttttttcctgtaaggctagacaaaagaattcccagtaacttccttgtgttgtgtgtgttcgactcacagagttgaactttcatttacagagagcagatttgaaacactctttttgtggaatttgcaagtggagatttcaagcgctttgaggccaaaggcagaaaaggaaatatcttcgtttcaaaactagacagaatcattctcagaaactgctgcgtgatgtgtgcgttcaactctcagagtttaacttttcttttcattcagcggtttggaaacactctgtttgtaaagtctgaacgtggaaattttgaccacttagaggccttcgttggaaacgggtttttttcttgtaaggctagacagaagaattcccagtaacttccttgtgttgtgtgcattcaactcacagagttgaacgttcccttagacagagcagatttgaaacactctatttgtgcaatttgcaagtgtagatttcaagcgctttaaggtcaatggcagaaaaggaaatatcttcgtttcaaaactagacagaatgattctcagaaactcctttgtgatgtgtgcgttcaactcacagagtttaacctttcttttcatagagcagttaggaaacactctgtttgtaaagtctgcaagtggatattcagacctccttgaggccttcgttggaaacgggatttcttcatattatggtagacagaagaattctcagtaacttccttgtgttgtgtgtattcaactcacagagttgaacgatcctttacacagagcagacttgaaactctctttttgtggaatttgcaagtggagatttcagccgctttgaggtcaatggtagaataggaaatatcttcctatagaaactagacagaatgattctcagaaactcctttgtgatgtgtgtgttcaactcacagaatttaacctttcttttcatagagcagttagtaaacactctgtttataaagtctgcaagtggatattcagacccctttgaggccttcgttggaatcgggatttcttcatattatgcaagacagaagaattcccagtaacttccttgtgttgtgtgtgttcaactcacagcgttgaactttcatttacacagagcagatttgaaacactctttttgtggaatttgcaagtggagatttcaagcgctttgaggccaaaggcagaaaaggaaatatcttcgtataaaaattagacagaatcattctcagaaactgctctgcgatgtgtgcgttcaactctcagagtttaactttgcttttcattcagcagtttggaaacactctgtttgtaaagtctgcacgtggataatttgaccacttagaggccttcgttggaaacgggttttttttatgtaaggctagacagaagaattcccagtaacttccttgtgttgtgtgcattcaactaacagagttgaacgttcccttagacagagcagatttgaaacactctatttgtgcaatttgcaagtgtagatttcaagcgctttaaggtcaatggcagaaaaggaaatatcttcgtttcaaaactagacagaatcattcccacaaactgcgttgtgatgtgttcgttcaactcacagagtttaacctttctgttcatagaacagttaggaaacactctgtttgtaaagtctgcaagtggatattcagacctctttgaggccttcgttggaaacgggatttcttcatattatgctagacagaagaattctcagtaacttccttgtgttgtgtgtattcaactcacagagttgaacgatcctttacacagaccagacttgaaacactctttttgtggaatttgcaaatggagatttcagccgctttgaggtcaatggtagaaaaggaaatatcttcgtataaacactagacagaatgattctcagaaactcctttgtgatgtgtgcgttcaactcacagagtttaacctttcttttcatagagcagttaggaaacactctgtttgtaaagtctgcaagtggatattcagacatctttgaggctttcgttggaaacgggatttcttcatattctgctatacagaagaattctcagaaacttccttgtgttgtgtgttttcaactcacagagttgaacgatgctttacacagagcagacttgaaacactctttttgtggaatttgcaagtggagatttcagccgctttgaggtcaatggtagaataggaaatatcttcctatagaaactagacagaatcattctcagaaactgctctgcgatgtgtgcgttcaactctcagagtttaacttttcttttcattcagcagtttggaaacactctgtttgtaaagtctgaaggtggatattttgaccacttagaggccttcgttggaaacgggtttttttcctgtaaggctagacagaagaattcccagtaacttccttgtgttgtgtacattcaactcacagagttgaacgttcccttagacagagcagacttgtaacactctttttgtgtaatttgcaagtggagatttcagccgctttgaagtcaaaggtagaaaaggaaatatcttcctataaaaagtagacagaatcattcccacaaactgcgttgtgatgtgttcgttcaactcacagagtttaacctttctgttcatagagcagttaggaaacactctgtttgtaaagtctgcaagtggatattcagacctccttgaggccttcgttggaaacgggatttcttcatattctgctagacagaataattctcagtaacttccttgtgttgtgtgtattcaactcacagagttgaacgatcctttacacagagcagacttgaaacactctttttgtggaatttgcaagtgtagatttcaagcgctttaaggtcaatggcagaaaaggaaatatcttcgtttcaaaactagacagaatgattctcagaaactcctttgtgatgtgtgcgttgaactcacagagtttaacctttcttttcatagagcagttaggaaacactctgtttgtaaagtctgcaagtggatattcagacatcgttgaggctttccttggaaacgggatttcttcatattctgctagaaagaagaattcccagtaacttccttgtgttgtgtgtgttcaactcacagagttgaactttcatttacacagagcagatttgaaacactctttttgaggaatttgcaagtggagatgtcaagcgctttgaggccaaaggcagaaaaggaaatatcttcgtttcaaaactagacagaatcattctcagaaactgctctgcgatgtgtgcgttcaactctcagagtttaacttttcttttcattcagcagtttggaaacactctgtttgtaaagtctccacgtggatattttgaccacttagaggccttcgttggaaacgggtttttttcctgtaaggctagacagaagaattcccagtaacttccttgtgttgtgtacattcaactcacagagttgaacgttcccttagacagagcagatttgaaacactctttttgtgcaattggcaagtggagatttcaagcgctttgaggtcaatggcagaaaaggaaatatcttcgtttcaaaactagacagaataattcccacaaactgcgttgtgatgtgttcgttcaactcacagagtttaacctttgttttcatagaggagttaggaaacagtctgtttgtaaattctgtaagtggatattgtgacatcttgtggccttcgttggaaacgggatttcttcatattctgctatacagaagaattctcagtaacttccttgtgttgtgtgtattcaactcaaagagttcaacgatcctttatacagagcagacttgaaacactctttttgtggaatttgcaagtggagatctcagccgatttgtggtcaatagtagaaaaggaaatatcttcgtataaaaactagacagaatgactctcagaaactcctttgtgatgtgtgcgttcaactcacagagtttaacttttcttttcatagaccagttaggaaacactctgtttgtaatgtctgcaagtggatattcagacctctttgaggccttcgttggaaacgggatttcttcatattctgctagacagaagaattcccagtaacttccttgtgttgtgtgtgttcaactcacagagttgaactttcatttacacagagcagatttgaaacactctttttgtggaatttgcaagtggagatttcaagcgctttgaggccaaaggcggaaaaggaaatatcttcgtttcaaaactagacagaatcattcccagaaactgctctgcgatgtgtgcgttcaactctcagagtttaacttttcttttcattcagcagtttggaaacactctgtttgtaaagtctgcacgtggatattttgaccacttagaggccttcgttggaaacgggtttttttcctgtaaggctagacagaagaattcccagtaacttccttgtgttgtgtacattcaactcacagagtggaacgttcccttagacagagcagatttgaaacactctttttgtgcaattggcaagtggtgatttcagccgctttgaggtcaatggtataaaaggaaatatcttcgtataaaaactagacagaatcattcccacaaactgcgttgtgatgtgttcgttcaactcacagagtttaacctttctgttcatagagcagttaggaaacactctgtttgtaaagtctgcaagtggatattcagacctctttgaggccttcgttggaaacgggatttcttcatattatgctagacagaagaattctcagtaacttccttgtgttgtgtgtattcaactcacagagttgaacgatcctttacacagagcggacttgaaacactctttttgtggaatttgcaagtggagatttcagccgcgttgaggtcaatggtagaaaagaaaatatcttcgtataaaaactagacagaatgattctcagaaactcctttgtgatgtgtgtgttcaactcacagagtttaacctttcttttcatagagcagttaggaaacactctgtttgtaaagtctgcaagtggatattcagacctctttgaggccttcattggaaacgggtttttttcatataaggctagacagaagaattcccagtaacttccttgtgttgtgtgtgttcaactcacagagttgaactttcatttacacagagcagatttgaaacactctttttgtggaatttgcaagtggagatttcaagcgatttgagaccaaaggcagaaaaggaaatatcttcgtttcaaaactagacagaatcattctcagaaactgctgtgtgatgtgtgcgttcaactctcagagtttaacttttcttttcattcagcggtttggaaacactctgtttgtaaagtctgcacgtggatattttgaccacttagaggccttcgttggaaacgggtttttttcatgtaaggctagacagaagaattctcagtaacttccttgtgttgtgtacattcaactcacagagttgaacgatcctttacacagagcagacttgtaacactctttttgtggaatttgcaagtggagatttcagccgctttgaagtcaaaggtagaaaaggaaatatcttcctataaaaactagacagaatgattgtcagaaactcctttgtgatgtgtgcgttcaactcacagagtttaacctttcttttcatagagcagttaggaaacactctgtttgtaaagtctgcaagtggatattcagacctctttgaggccttcgttggaaacgggatttcttcatactgtgctagacagaagaattctcagtaacttccttgtgttgtgtgtattcaattcacagagttgaacgatcctttacacagagcagacttgtaacactctttttgtggaaattgcaagtggagatttcagccgctttgaagtcaaaggtagaaaaggaaatatcttcctataaaaactagacagaatgattctcagaaacttctttgtgatgtgtgcgttcaactcacagagtttaacctttcttttcatagagcagttaggaaacactctgtttgtaaactctgcaagtggatattcagacctcttcgaggccttcgttggaaacgggatttcttcatactgtgctagacagaagaattcccagtaacttccttgtgttgtgtgtgttcaagtcacagagttgaactttcatttacacagagaagatttgaaacactctttttgtggaatttgcaagtggagatttcaagcgctttgaggccaaaggcagaaaaggaaatatcttcgtttcaaaactagacagaatcattctcagaaactgctctgcgatgtgtgcgttcaactctcagagtttaacttttcttttcattcagcagtttggaaacactctgtttgtaaagtctgcacgtggatattttgaccatttagaggctttcgttggaaacgggtttttttcttgtaaggctagacagaagaattcccagtaacttccttgtgttgtgtacattcaactcacagagttgaacgtttccttagagagagcagatttgaaacactctttttgtgcaattggcaagtggtgatttcagccgctttgaggtcaatggtagaaaaggaaatatcttcgtataaaaactagacagaatgattctcagaaactcctttgtgatgtgtgcgttcaactcacagagtttaccctttcttttcatagagcagttaggaaacactctgtttgtaaagtctgcaattggatattcagacatccttgaggctttcgttggaaacgggatttcttcatattctgctagaaagaagaattctcagtaacttccttgtgttgtgtgtattcaactcacagagttgaacgatcctttacacagagcagacttgaaacactctttttgtggaatttgcaagtggagatttcagccgctttgaagtcaatggtagaataggaaatatcttcctatagaaactagacagaatgattctcagaaactcctttgtgatgtgtgtgttcaactcacagagtttaacctttcttttcatagagcagttagtaaacactctgtttataaagtctgcaagtggatattcagacccctttgaggtcttcgttggaaacgggatttcttcatattatgctagacagaagaattcccagtaacttccttgtgttgtgtgtgttcaactcacagagttgaactttcatttacacagagcagatttgaaacactctttttgtggaatttgcaagtggagatttcaagcgctttgaggccaaaggcagaaaagggaatatcttcgtataaaaactagacagaatcattctcagaaactgctctgcgatgtgtgcgttcaactctcagagtttgacttttcttttcattcagcagtttggaaacactctgtttgtaaagtctgcacgtggatattttgaccacttagaggccttcgttggaaacgggtttttttcctgtaaggctagacagaagaattcccagtaacttccttgtgttgtgtacattcaactcacagagttgaacgttcccttagacagagcagatttgaaacactctttttgtgcaattggcaaatggagatttcaagcgctttaaggtcaatggcagaaaaggaaatatcttcgtttcaaaactagacagaatcattcccacaaactgcgttgtgatgtgttcgttcaactcacagagtttaacctttcttttcatagagcagttaggaaacagtctgtttgtcaattctgtaagtggatattctgacatcttgtggccttcgttggaaacgggatttcctcatactctgctagacagaagaattctcagtaacttccttgtgttgtgtgtattcgactcacagagttgaacgatcctttacacagagcatacttgaaacactctttttgtggaatttgcaagtggagatttcagccgctttgaggtcaatggtagaataggaaatatcttcctatagaaactagacagaatgattctcagaaactcctttgtgatgtgtgcgttcaactcacagagtttaacctttcttttcatagagcagttaggaaacactctgtttgtaaagtctgcaagtggatattcagacatctttgaggctttctttgaaatgggatttcttcatattctgctagacagaagaattcccagtaacttccttgtgttgtgtgtgttcaactcacagagttgaactttcatttacacagagcagatttgaaacactctttttgtggaatttgcaagtggagatttcaagcgctgtgaggccaaaggcagaaaaggaaatatcctcgtataaaaactagacagaatcattctcagaaactgctgcatgatgtgtgcgttcaactctcagagtttaacttttcttttcattcagcggtttggaaacactctgtttgtaaagtctgcacgtggatattttgaccacttagaggccttcgttggaaacgggttttttcatgtaaggctagacagaagaattcccagtaacttcccttgtgttgtgtgcattcaactcacagagttgaacgttcccttagacagagcagatttgaaacactctatttgtgcaatttgcaagtgtagttttcaagctctttaaggtcaacggcagaaaaggaaatatcttcgtttcaaaactagacagaatcattcccacaaactgcgttgtgatgtgttcgttcaactcacagagtttaacgtttcttttcatagagcatttaggaaacagtctgtttgtcaattctgtaagtggatattctgacatcttgtggccttcgttggaaacgggatttcttcatattctgctagacagaagaattctcagtaacttccttgtgttgtgtttattcaacacacagagttgaatgatcctttacacagagcagacttgaaacactctttttgtggaatttgcaagtggagatttcagccgctttgtggtcaatggtagaaaaggaaactatcttcatataaagactagacagaatgattctcagaaactcctttgtgatgtgtgcgttcaactcacggagtttaacctttcttttcatagagcagttaggaaacactctgtaaagtctgcaagtagatattcagacctctctgaggccttcgttggaaacgggatttcttcatattatgctagacagaagaattctcagtaacttccttgtgttgtgtgcattcaactcacagagttgaaagatcctttacacagagcagattagaaacaatatttttgtggattttgcaagcggagatttcagccactttgaggtcaatggtagaaaaggaaatatcttcataaaaaaactagacagaatcattctcagaaactgctgcgtgatgtgtgcgttcaactctcagagtttaacttttcttttcattcagcggtttggaaacactctgtttgtaaagtctgcacgtggaaattttgaccacttagaggccttcgttggaaacgggtttttttcatgtaaggctcgacagaagaattcccagtaacttccttgtgttgtgtacattcaactcacagagttgaacgttcccttacacagagcagatttgaaacactctttttgtgcaattggcaagtggagatttcaagcgctttaaggtcaatggcagaaaaggaaatatcttcgtttcaaaactagacagaatcattcccacaaactgcgttgtgatgtgtgcgttcaactcacagagtttaacttttcttttcatagagcagttaggaaacactctgtttgtaaagtctgcaagtggatattcagacctctttgaggccttcgttggaaacgggatttcttcatattctgctagacagaagaattctcagtaacttccttgtgttgtgtgtattcaactcacagagttgaacgatcctttacacagagcagacttggaacactgttcttgtggaatttgcaagtggagatttcagccgcgttgaggtcaatggtagaaaaggaaatatcttcgtataaaaactagacagaatgattctcagaaactcctttgtgatgtgtgcgttcaactcacagagtttaaccattcttttcatagagcagttaggaaacactctgtttgtaaagtctgcaagtggatattcagacctccttgaggccttcgttggaaacgggatttctttatattctgctagacagaaggattcccagtaacttccttgtgttgtgtgtgttcaactcacagagttgaactttcatttacaaagagcagatttgaaacactctttttgtggaatttgcaagtggagatttcaagcgctttgaggccaaaggcagaaaagtaaatatcttcgtataaaaactagacagaatcattctcagaaactgctctgcgatgtgtgcgttcaactctcagagtttaacttttcttttcattcagcagtttggaaacactctgtttgtaaagtctgcacgtggataatttggccacttagaggccttcgttggaaacgtgtttttttcatgtaaggctagacagaagaattcccagtaacttccttgtgttgtgtgcattcaactcacagagttgaacgttcccttagacagagcagatttgaaacagcctatttgtgcaatttgcaagtgtagatttcaagcgctttaaggtcaacggctgaaaaggaaatatcttcgtttcaaaactatacagaatgattctcagaaactcctttgtgatgtgtgcgttcaactcacagagtttaaccttacttttcatagagcagttaggaaacactctgtttgtaaagtctgcaagtggatattcagacctccttgaggccttcattggaaacgggatttcttcatgttctgctagacagaataattctcagtaacttccttgtgttgtgtgtattcaactcacagagttgcacgatcctttacacagagcagacttgaaacactctttttgtggaatttgcaagtggagatttcagccgctttgaggtcaatagtagaaaaggaaatatcttcgtagaaaaactacacagaatgattctcagaaactcctttgtgatgtgtgtgttcaactcactgagtttaacctttcttttcatagaacagttagtaaacactctgtttataaagtctgcaaatggatattcagacccatttgaggccttcgttggaaacgggatttcttcatattatgctagacagaagaattcccagtaacttccttgtgttgtgtgtgttcaactcacatagttgaactttcatttacacagagcagatttgaaacactctttttgtggaatttgcaaatggagatttcaagcgctttgaggccaaaggcagaaaagcaaatatcttcgtataaaaactagacagaatcattctcagaaactgctctgcgatgtgtgcgttcaactctcagagtttaacttttcttttcattcagcagtttggaaacactctgtttgtaaagtctgcacgtggatattttgaccacttagaggccttcgttggaaatgggtttttttcctgtaaggctagacagaagaattcgcagtaacttccttgtgttgtgtacattcaactcacagagttgaacgttcccttagacagagcagatttgaaacactctttttgtgcaattggcaagtggagatttcaagcgctttaaggtcaatggcagaaaaggaaatatcttcgtttcaaaactagacagaatcattcccacaaactgcgttgtgatgtgttcgttcaactcacagagtttaacctttctgttcatagagcagttaggaaacactctgtttgtaaagtctgtaagtggatattctgacatcttgtggccttcgttggaaacgggatttattcatattctgctagacagaagaattctcagtaacttccttgtgttgtgtgtattcaactcacagagttgaatgatcctttacacagaacagacttgaaacactctttttgtggaatttgcaagtggagatttcagccgctttgtggtcaatggtagaataggaaatatcttcctatagaaactagacagaatgattctcagaaaatcttttgtgatgtgtgcgttcaactcacagagtttaacttttcttctcatagagcagttaggaaacactctgtttgtaaagtctgcaagtggatattcagacctccttgaggccttcgttggaaacgggatttcttcatattctgccagacagaaggattcccagtaacttccttgtgttgtgtgtgttcaactcacagagttgaactttcatttacaaagagcagatttgaaacactctttttgtggaatttgcaagtggagatttcaagcgctttgaggccaaaggcagaaaaggaaatatcttcgtataaaaactagacagaatcattctcagaaactgctctgcgatgtgtgcgttcaactctcagagtttaacttttcttttcattcagcagtttggaaacaatctgtttgtaacgtctgcacgtgaataatttgaccacttagaggccttcgttggaaacgggtttttttcatgtaaggctagacagaagaattcccagtaacttccttgttttgtgtacattcaactcacagagttgaacgttcccttagatagagcagatttgaaacactctttttgtgcaattggctagtggtgatttcagccgctttgaggtcaatggtagaaaaggaaatatcttcgtataaaaactagacagaatgattctcagaaacttcattgtgatgtgtgcgttcaactcacagagtttaacctttcttttcatacagcagttaggaaacactctgtttgtaaactctgcaagtggatattcagacctctttgaggccttcgttggaaacgggaattcttcatactgtgctagacagaagaattctcagtaacttccttgtgttgtgtgtattcaactcacagagttgaaggatcctttacagagagcaggcttgaaacactctttttgtcgaatttgcaagtggagatttcagccgctttgaggtcaatggtagaataggaaatatcttcttatagaaactagacaaaatgattctcagaaacttctttgtgatgtgtgcgttcaactcacagagtttaacctttcttttcatagagcagttaggaaaccctctgtttgtaaactctgcaagtggatattcagaccactttgaggccttcgttggaaacgggatttcttcatactatgctagacagaagaattcccagtaacttccttgtgttgtgtgtgttcaactcacagagttgaactttcatttacacagagcagatttgaaacactctttttgtggaatttgcaaatggagatttcaagcgctttggggccaaaggcagaaaaggaaatatcttcgtataaaaactagacagaatcattctcagaaactgctctgcgatgtgtgcgttcaactctcagagtttaacttttcgtctcattcagcagtttggaaacactctgtttgtaaagtctgcacgtggataatttgaccacttagaggccttcgttggaaacgggtttttttcatgtaaggctagacagaagaattcccagtaacttccttgtgttgtgtacattcaactcacagagttgaacgttcccttagacagagcagatttgaaacactctttttgtgcaattggcaagtggagatttcaagcgcttgaggtcaatggcagaaaaggaaatatcttcgtttcaaaactagacagaatcattcccacaaactgcgttgtgatgggttcgttcaactcacagagtttaacctttcttttcatagagcagttaggaaacagtctgtttgtcaattctgtaagtggatattctgacatcttgtggccttcgttggaaacgggatttctttatattctgctagacagaataattctcagtaacttccttgtgttgtgtgtattcaactcacagagttgaacgatcctttacagagtgcaaacttgaaacactctttttgtggaatttgcaagtggagatttcagccgctttgaggtcaatgatagaataggaaatatcttcctatagaaactagacagaatgattctcagaaactcctttgtgatgtgtgtgttcaactcacagagtttaacctttcttttcattcagcagttaggaaacactctgtttgtaaagtctgcaagtggatattcagacctctttgaggccttcgttggaaacgggtttttttcatataaggctagacagaagaattcccagtaacttccttgtgttgtgtgtgttcaactcacagagttgaactttcatttacacagagcagatttgaaacactctttttgtggaatttgcaagtggagatttcaagcgctttgtggccaaaggcagaaaaggaaatatcttcgtataaaaactagacagaatcattctcagaaactgctgcgtgatgtgtgcgttcaactctcagagtttaacttttcttttcattcagaggtttggaaacactctgtttgtaaagtctgcacgtggatattttgaccacttagaggccttcgttggaaacgggttttttgcatgtaaggctagacagaagaattcccagtaacttccttgtgttgtgtgcattcaactcacagagttgaacgttcccttagacagagcagatttgaaacactctatttgtgcaatttgcaagtgtagatttcaagcgctttaaggtcaatggcagaaaaggaaatatcttcgtttcaaaactagacagaatcattcccacaaactgcgttgtgatgtgttcgttcaactcacagagtttaacctttctgttcatagagcagttaggaaacactgtgtaaagtctgtaagtggatattctgacatcttgtggccttcgttggaaacgggatttcttcatattctgctagacagaagaattctcagtaactgccttgtgttgtgtgtattcaactcacagagttgaacgatcctttacacagagcagacttgaaacactctttttgtggaacttgcaagtggagatttcagccgctttgaggtcaatggtagaataggaaatatcttcctatagaaactagacagaatgattctcagaaacttctttgtgatgtgtgcgttgaactcacagagtttaacctttcttttcatagagcagttaggaaacactctgtttgtaaactctgcaagtggatattcagacctctttgaggccttcgttggaaacgggatttcttcatactgtgctagacagaagaattttcagtaacttccttgtgttgtgtgtattcaactcacagagttgaacgatcctttacacagagcagacttgaaacactctttttgtggaaattgcaagtggagatttcagccgctttgaggtcaatggtagaaaaggaaatatcttcgtataaaaactagacacaatgattctcagaaactcctttgtgatgtgtgcgttcaactcacagagtttaacctttcttttcatagagcagttaggaaacactctgcttgtaaagtctgcatgtggatattcagacctctttgaggccttcgttggaaacgggtttttttcatataaggctagacagaagaattcccagtaacttccttgtgttgtgtacattcaactcacagagttgaacgttcccttagacagagcagatttgaaacactctttttgtgcaattggcaaatggagatttcaagcgctttaaggtcaatggcagaaaaggaaatatcttcgtttcaaaactagacagaatcattctcagaaactgctgcgtgatgtgtgcgttcaacactcatagtctaacttttcttttcattcagcggtttggaaacactctgtttgtaaagtctgaacgtgcatattttgaccacttagaggccttcgttggaaacgggtttttttcatgtaaggctagacagaagaattcccagtaacttccttgtgttgtgtccattcaactcacagagttgaacgttcccttagacagagcagatttgaaacactctatttgtgcaatttgcaagtgtagatttcaagcactttaaggtcaacggcagaaaaggaaatatcttcgtttcaaaactagacagaatcattcccacaaactgcgttgtgatgtgttcgttcaactcacagagtttaacctttctgttcatagagcagttaggaaacactctgtttgtaaagtctgcaagtggatattcagacctccttgaggccttcgttggaaacgggatttcttcatattctgctagacagaagaattcccactaacatccttgtgttgtgtgtgttcaactcacagagttgaactttcatttacacagagcagatttgaaacactctttttgtggaatttgcaaatggagatttcaagcgctttgaggccaaaggcagaaaaggaaatatcttcgtttcaaaactagacagaatgattctcagaaactcctttgtgatgtgtgcgtgcaactcacagagtttaacttttcttttcatagagcagttaggagacactctgtttgtaaagtctggaagtggatattcagacctccttgaggccttcgttggaaacgggatttcttcatattctgctagacagaagaattctcagtaacttcctcgtgttgtgtgtattcaacctcacagagttgaacgatcctttacacagagcagacttgaaacacactttttgtggaatttgcaagtggagatttcagccgctttgaggtcaatggtagaaaaggaaatatcttcgtataaagactagacagaatcattcccacaaactgcgttgtgatgtgtgcgttcaagtcaaagagtttaacctttcttttcatagagcagttaggaaacactctgtttgtaaagtctgcaagtggatattcagacctccttgaggccttcgttggaaacgggatttcttcatattctgctagacagaagaattctcagaaacttccttgtgttgtgtgtattcaactcacagagttgaacgatcgtttacacagagtagacttgagacactctttctgtggaatttgcaagtggagatttcagccgctttgaggtcaatggtagaaaagtaaatatcttcgtataaagactagacagaacgattctcagaaactcctttgtgatttgtgcgtacaactcacagagtttaacctttcttttcatagagcagttaggaaacactctctttgtaaagtctgcaagtggatattcagacctctttgaggccttcgttggaaacgggatttcttcatattctgctagacagaagaattctcagtaacttccttgtgttgtgtttattcaactgacagagttgaactttcatttagagagagcagatttgaaacactgtttttgtggaatttgcaagtggagatttcaagctttggggccaaaggcagaaaaggaaatatcttcgtataaaaactagacagaatcattctcagaaactgctgcgtgatgtgtgcgttcaactctcagagtttaacttttcttttcattcagcggtttggaaacactctgtttgtatagtctgcacgtggatattttgaccacttagaggccttcgttggaaacgggtttttttcatgtaaggctagacagaagaattcccagtaacttccttgtgttgtgtgcattcaacccacagagttgaacgttcccctagacagagcagatttgaaacactctatttgtgcaatttgcaagtgtagttttcaagctcttttaggtcaacggcagaaaaggaaatatcttggtttcaaaactagacagaatcattcccacaaactgcgttgtgatgtcttcgttcaacacacagagtttaacctttcttttcatagagcagttaggaaacagtctgtttgtaaattctgtaagtggatattctgacatcttgtggccttcgttggaaacgggatttcttcatattctgctagacagaagaattctcagaatcttccttgtgttgtgtgtattcaactcacagaggtgaacggtcctttacacagagcagacttgaaacactctttttgtggaatttgcaagtggagatttcagccgctttgaggtccatggtagaaaaggaaatatcttcgtataaaaactagacagaatgattctcagaacctcctttgtgatgtgtgcgttcaactcacagagtttaacctttcttttcatagagcagttaggaaacactctgtttgtaaagtctgcaagtggatattcagacatccttgaggctttcgttggaaacgggatttcttcatattctgctagaaagaagaattctcagtaacttccttgtgttgtgtgtattcaactgacagagttgaactttcatttagagagagcagatttgaaacactgtttttgtggaatttgcaagtggagatatcaagcgccttggggccaaaggcagaaaaggaaatatcttcgtttaaaaagtagacagaatgattctcagaaactcctttgtgatgtgtgcgttcaactcacagagtttaacttttcttttcatagagcagttaggaaacactctgtttgtaaagtctgcaagtggatattcagacctctttgaggccttcgttggaaacgggatttcttcatattttgctagacagaagaattcccagtaacttccttgtgttgtgtgcactcaactcacagagttgaacgttcccttagacagagcagatttgaaacactctatttgtgcaatttgcaagtggagatttcaagcgctttatggtcaatggaagaaaaggaaatatcttcgtttcaaaactagacagaatgattctcagaaacttctttgtgatgtgtgcgttcaactcacagagtttaacctttcttttcatagagcagttaggaaacactctgtttgtaaactctgcaagtggatattcagacctctttgaggccattgttggaaacgggatttcttcatactatgctagacagaagaattctcagaatcttccttgtgttgtgtgtattcaactcacacagttgaacgactgtttacacagagcagatgtgaaacactctttttgtggaatttgcaagtggagatttcagccgctttgaggtcaatggtagaaaaggaaatatcttcgtataaaaactagacagaatgattctcagaaacttctttgtgatgtgtgcgttcaactcacagagtttaacctttcttttcatagagcagttaggaaacactctgtttgtaaactctgcaagtggatattcagacctctttgaggccttcgttggaaacgggatttcttcatactgtgctagacagaagaattctcagtaacttccttgtgttgtgtgtattcaactcacagagttgaacgatcctttacacagagcggacttgaaacactctttttgtggaatttgcaagtggagatttcaggcgcgttgaggtcaatggtagaaaaggaaatatcttcgtataaaaactagacagaatcattctcagaaaatgctctgtgatgtgtgcgttcaactctcagagtttaacttttcttttcattcagcactttggaaacactctgtttctaaagtctgcacgtggatattttgaccacttagaggtctttgttggaaacgggtttttttcacgtaaggctagacagaagaattcccagtaacttccttgtgttgtgtacattcaactcacagagttgaacgttcccttagacagagcagatttgaaacactctttttgtgcaattggcaaatggagatttcaagcgctttaaggtcaatggcagaaaaggaaatatcttcgtttcaaaactagacagaatgattctcagaaaattctttgtgatgtgtgcatcaaatcacagagtttaacctttcttttcatagagcagttaggaaacactctgtttgtaaactctgcaagtggatattcagacctctttgaggccttcgttggaaacgggatttcttcatactgtgctagacagaagaattctcagtaacttccttgtgttgtgtgtattcaactcacagagttgaacgatcctttacacagagcagacttgaaacgctctttttgtggaatttgcaagtggagatttcagccgcgttgaggtcaatggtagaaaaggaaatatcttcgtataaaaactagacagaatgattctcagaaactcctttgtgatgtgtgctgttcaactcacagagtttaacctttcttttcatagagcagttaggaaacactctgtttgtaaagtctgcaagtggatattcagacctctttgaggccttcgttggaaacgggtttttttcatataaggctagacagaagaattctcagtaacttccttgtgttgtgtgtattcaactgacagagttgaactttcatttagagagagcagatttgaaacactgtttttgtggaatttgcaaatggagatttcaagcgctttggggccaaaggcagaaaaggaaatatcttcgtataaaaactagacagaatcattctcagaaactgctgcgtgatgtgtgcgttcaactctcagagtttaacttttcttttcattcagcggtttggaaacactctgtttgtaaagtctgcacgtggaaattttgaccacttagaggccttcgttggaaacgggtttttttcatgtaaggctagacagaagaattcccagtaacttccttgtgttgtgtgcattcaactcacagagttgaacgttcccttagacagagcagatttgaaacactctatttgtgcaatttgaaagtgtagatttcaagcgctttaaggtcaacggcagaaaaggaaatatcttcgtttcaaaactagacagaatgattctcataaactcctttgtgatgggtgcgttcaactcacagagtttaacctttcttttcatagagcagttaggaaacactctgtttgaaaagtctgcaagtggatattcagacctccttgaggccttcgttggaaacgggatttcttcatattctgctagacagaagaattctcagtaacttccttgtgttgtgtttattcaactcacagagttgaatgatcctttacacagagcagacttgaaacactctttttgtggaatttgcaagtggagatttcagccgctttgaggtcaatggtagaataggaaatatcttcgtataaagactagacagaatgattctcagaaactcctttgtgatgtgtgcgttcaactcacagagtttaacctttcttttcatagagcagttaggaaacactctgtttgtaaagtctgcaagtggatattcagacctccttgaggccttcgttggaaacaggatttcttcatattctgctagacagaagaattctcagtaacttctttgtgttgtgtgtattcaactcacagagttgaacgatcctttacacagagcagacttgaaacactctttttgtggaatttgcaagtggagattacagccgctttgacgtcaatggtagaaaaggaaatatattcgtataaagactagacagaatcattctcagaaactactctgtgatgtgtgcgttcaactctccgagtttaacttttcttttcattcagtagtttggaaacactctgtttgtaaatctgcacgtggatattttgacgacttagaggctttcgttggaaacgggtttttttcatgtaaggctagacagaagaattcccagtaacttccttgtgttgtgtgcattcaactcacagagttgaacgttcccttagacagaacagatttgaaacactctatttgtgcaatttgcaagtgtagatttcaagcgctttaaggtcaatggcagaaaaggaaatatcttcgtttcaaaactagacagaatcattcccacaaactgcgttgtgatgtgctcgttcaactcacagagtttaacctttctgttcatagagcagttaggaaacactctgtttgtaaagtctgcaagtggatattcagacctccttgaggccttcgttggaaacgggatttcttcatattctgctagacagaataattctcagtaacttccttgtgttgtgtgtattcaactcacagagttgtacgatcctttacacagagcagacttgaaacactctttttgtggaatttgcaagtggagatttcagccgctttgaggtcaatggtagaaaaggaaatatcttcgtataaagactagacagaatgattctcagaaactcctttgtgatgtgtgcgttcaactcacagagttcaacctttcttttcatagagcagttaggaaacactctgtttgtaaagtctgcaagtggatattcagacctccttgaggccttcgttggaaacgggatttcttcatattatgctagacagaagaattctcagtaacttccttgtgttgcgtgtattcaactcacagagttgaacgatcctttacacagagcagacttgaaacactctttttgtggaatttgcaagtggagatttcagccgctttgaggtcaatggtagaataggaaatatcttcctatagaaactagacagaatcattctcagaaactgctgcgtgatgtgtgcgttcaactctcagagtttaacttttcttttcattcagcggtttggaaacactctgtttgtaaagtctgcacgtggaaattttgaccacttagaggccttcgttggaaacgggtttttttcatttaaggctagacagaagaattcccagtaacttccttgtgttgtgtgcattcaactcacagagttgaacgttcccttagacagagcagatttgaaacactctatttgtgcaatttgcaagtgtagatttcaagcgctttaaggtcaacggcagaaaaggaaatatcttcgtttcaaaactagacagaatcattcccacaaactgcgttgtgatgtgttcgttcaactcagagtttaacctttctgttcatagagcagttaggaaacactctgtttgtaaagtctgtaagtggatattctgacatcttgtggccttcgttggaaacgggatttcttcatattctgctagacagaagaattctcagtaacttccttgtgttgtgtgtattcaactcacagagttgaacgatcctttacacagagcagacttgtaacactctttttgtggaatttgcaagtggagatttcagccgctttgaagtccaaggtagaaaaggaaatatcttcctataaaaactagacagaatgattctcagaaactcctttctgatgtgtgcgttcaactcgcagagtttaacttttcttttcatagagcagttaggaaacactctgtttgtaaagtctgcaagtggatattcggacctctttgaggccttcgttggaaacgggaattcttcatattatgctagacagaagaattcccagtaacttccttgtgttctgtgtgttcaactcacagagttgaactttcatttacacagagcagatttgaaacactctttttgtggaatttgcaagtggagatttcaagcgctttgaggccaaaggcagaaaaggaaatatcttcgtttcaaaactagacagaatcattctcagaaactgctgcgtgatgtgtgcgttcaactctcagagtttaacttttcttttcattcagcggtttggaaacactctgtttgtaaagtctgcacgtggaaattttgaccacttagaggccttcgttggaaacgggtttttttcatgtaaggctagacagaagaattcccagtaacttccttgtgttgtgtgcattcaactcacagagttgaacgttccattagacagagcagatttgaaacactctatttgtgcaatttgcaagtgtagatttcaagcgctttaaggtcaatggcagaaaaggaaatatcttcgtttcaaaactagacagaatgattctgagaaactcctttgtgatgtgtgcgttcaactcacagagtttaacttttcttttcatagagcagttaggaaacactctgtttgtaaagtctgcaagtggatattcagacctccttgaggccttggttggaaacgggatttcttcatattatgctagacagaataattctcagtaacttccttgtgttgtgtgtattcaactcacagagttgaacgatcctttacagagagcagagttgaaacactctttttgtggaatttgcaagtggagatttcagccgctttgaggtcaatggtagaaaaggaaatatctttgtataaagactagacagaatgattctcagaaactcctttgtgatgtgtgcgttcaactcacagagtttaacttttcttttcatagagcagttaggaaacactctgtttgtaaagtctgcaagaggatattcagacctctttaaggccttcgttggaaaagggatttcttcatattctgctagacagaagaattctcagtaacttccttgtgttgtgtgtattcaactgacagagttgaactttcatttagagagagcagatttgaaacactgtttttgtggaatttgcaagtggagatttcaagcactttggggccaaaggcagaaaacgaaatatcttcgtataaaaagtagacagaatcattctcagaaactgctgcgtgatgtgtgcgttcaactctcagactttaacttttcttttcattcagcggtttggaaacactctgtttgtaaagtctgcacgtggatattttgaccacttagaggccttcgttggaaacgggtttttttcatgtaaggctagacagaagaattcccagtaacttccttgtgttgtgtacattcaactcacagagttgaacgttcccttagacagagcagatttgaaacactctttttgtgcaattggcaaatggagatttcaagcgctttaagttcaatggcagaaaaggaaatatcttcgtttcaaaactagacagaatcattcccacaaactgcgttgtgatgtgttcgttcaactcacagagtttaacctttccgttcatagagcagttaggaaacactctctaaagtctgtaagtggatattcagatctccttgaggtcttcgttggaaacgggatttcttcatattctgctagacagaagaattctcagtaactttccttgtgttgtgtgtattcaactcacagagttgaacgatcctttacacagagcagacttgtaacactctttttgtggaatttgcaagtggagatttcagccactttgaagtcaaaggtagaaaaggaaataacttcctataaaaactagacagaatgattctcagaaactcctttgtgatgtgtgcgttcaactcacagagtttaacctttcttttcatagagcagttaggaaacactctgtttgtaaagtctgcaagtggatattctgacctctttgaggccttcgttggaaacgggtttttttcatataaggctagacagaagtaatctcagtaacttccttgtgttgtgtgtattcaactgacagagttgaaatttcatttagagggagcagatttgaaacactgtttttgtggaatttgcaagtggagatttcaaacgctttggggccaaaggcagaaaaggaaacatcttcgtataaaaactagacagaatcattctcagaaactgctgcgtgatgtgtgcgttcaactctcagagtttaacttttcttttcattcagcggtttggaaacactctgtttgtaaagtctgcacgtggaaattttgaccacttagaggccttcgttggaaacgggattttttcatgtaaggctagacagaagaattcccagtaacttccttgtgttgtgtgcattcaactcacagagttgaacgttcccttagacagagcagatttgaaacactctatttgtgcaatttgcaagtgtagttttcaagctctttaaggtcaacggcagaaaaggaaatatcttcgtttcaaaactagaccgaatcattcccacaaactgcgttgtgatgtgttcgttcaactcacagagtttaacctttctgttcatagagcagttaggaaatactctgtttgtaaagtctgcaagtggatattcagacctccttgaggccttcgttggaaacgggatttcttcatattctgctagacagaataattctcagtaactttccttgtgttgtgtgtattcaactcacagagttgaacgatcctttacacagagcagacttgaaacactctatttgtagaatttgcaagtggagatttcagccgctttgaggtcaatagtagaaaaggaaatatcttcgtagaaaaactagacagaatgattctcagaaactcctttgtgatgtgtgcgttcaactcacagagtttaacctttcttttcatagagcagttaggaaacactgtgtttgtaaagtctgcaagtggatattcagacctccttgaggccttcgttggaaacgggatttcttcatattatgctagacagaagaattctcagtaacttccttgtgttgtgtgtattcaactcacagagttgaacgatcctttacacagagcatacttgaaacactcttcttgtggaatttgcaagtggagatttcagccactttgaggtcaatggtagaataggaaatatcttcctatagaaactagacagaatgattctcagaaactcctttgtgatgtgtgtgttcaactcacagagtttaacctttcttttcatacagcatttagtaaacactctgtttataacgtctgcaagtggatattcagacccctttgaggccttcgttggaaacgggatttcttcatattatgctagacagaagaattcccagtaacttccttgtgttgtgtgcattcaactcacagagttgaacgttcccttagacagagcagatttgaaacactctatttgtgcaatttgcaagtgtagatttcaagcgctttaaggtcaacggcagaaaaggaaatatcttcgtttcaaaactagacagaatcattaccacaaactgcgttgtgatgtgttcgttcaacccacagagtttaagctttctcttcatagagcagttaggaaacactctgtttgtgaagtctgtaagtggatattctgacatcttgtggccttcgttggaaacgggatttcttcatattctgctagacagaagaattctcagaatcttccttgtgttgtgtgtattcaactcacagagttgaacgatcctttacacagagcagacttgaaacactctttttgtggaatttgtaagtggagatttcagccgctttgaggtccatggtagaaaaggaaatatcttcgtataaaaactagacagaatgattctcagaaactcctttgtgatgtgtgcattcaactcacagagttcaacctttcttttcatagagcagttgggaaacactctgtttgtaaagtctgcaagtggatattcagacttctttgaggccttcgttggaagcgggatttcttcatgttctgctagacagaagaattcccagtaacttcccttgtgttggctgtgttcaactcacagagttgaactttcatttacacagagcagatttgaaacactctttttgtggaatttgcaaatggagatttcaagcgctttgaggccaaaggcagaaaaggaaatatcttcgtataaaaactcgacagaatcattctcagaaactgctctgcgatgtgtgcgttcaactctcagagtttaacttttcttttcattcagcagtttggaaacactctgtttgtaaagtctgcacgtggataacttgaccacttagaggccttcgttggaaacgggtttttttcatgtaaggctagacagaagaattcccagtaacttccttgtgttgtgtgcattaaactcacatagttgaacgtttccttagacagagctgaattgaaacacgctatttgtgcaatttgcaagtgtagatttcaagcgctttaaggtcaatggcagaaaaggaaatatcttcgtttcaaaactagacagaatcattcccaaaaactgcgttatgatgtgttcgttcatctcacagagtttaacctttcttttcatagagcagttaggaaacagtctgtttgtaaattctgtaagtggatattctgacatcttgtggccttcgttggaaacgggatttcttcatattctgctagacagaagaattctcagtaacttccttgtgttgtgtgtattcaactcacagagttgaacgatcatttacacagagcagacttgaaacactctttttgtggaatttgcaagtggagatttcagccgctttgaggtcaatggtagaaaaggaaatatcttcgtataaagactagacagaacgattctcagaaactcctttgtgatgtgtgcgttcaactcacagagtttaacctttcttttcatagagcagttaggaaacactttgtttgtaaagtctgcaagtggatattcagacctctttgaggccttcgttggaaacgggatttcttcctattctgctagacagaagaattctcagtaacttccttgtgttgtgtgtattcaactcacagagttgaacgatcctttacacagagcagagttgaaacactctttttgtggaatttgcaagtggagatttcagccgctttgaggtcaatagtagaaaaggaaatatcttcgtagaaaaactagacagaatcattctcagaaagtgctctgcgatgtgtgcgttcaactctcagagtttaactttgcttttcattcagcagtttggaaacactctgtttgtaaagtctgcacgtggataatttgaccacttagaggccttcgttggaaacgggtttttttcatgtaaggctagacagaagaattcccagtaacttccttgtgttgtgtacattcaactcacagagttgaacgttcccttagacagagcagatttgaaacactctttttgtgcaattggcaagtggagatttcaagcgctttgaggtcaatggcagaaaaggaaatatcttcgtttcaaaactagacagaatcattcccacaaactgcgttgtgatgtgttcgttcaactcacagagtttaacctttcttttcatagagcagttaggaaacagtctgtttgaaaattctgtaagtggatattctgacatcttgtggccttcgttggaaacgggatttcttcatattactgctagacagaagaattctcagtaacttccgcgtgttgtgtgtattcaactcacagagttgaacgatcctttacacagagcagacttgaaacactctttttgtggaatttgcaagtggagatttcagccgctttgaggtcaatggtagaaaaggaaataccttcctataaaaactagacagaatgattctcagaaactcctttgtgatgtgtgcgttcaactcacagagtttaacctttcttttcatagagcagttaggaaacactctgtttgtaaagtctgcaagtggatattcagacctctttgaggccttcgttgaaaacgggatttcttcatattctgctagggagaagaattctcagtaacttccttgtgttgtgtgtattcaactgacagagttgaactttcatgtagagagagcagatttgaaacactgtttttgtggaatttgcaagtggagatttcaagcgctttggggccaagggcagaaaaggaaatatcttcgtataaaaactagacagaatcattctcagaaactgctctgcgatgtgtgcgttcaactctcagagtttaacttttcttttcattcagcagtttggaagcactctgtttgtaaagtctgcacgtggataatttgaccacttagaggccttcgttggaaacgggtttttttcatataaggctagacagaagaattcccagtaacttccttgtgttgtgtgcattcaactcacagagttgaacgttcccttagacagagcagatttgaaacactctatttgtgcaatttgcaagtgtagatttcaagcgctttaaggtcaatggcagaaaaggaaatatcgtcgtttcaaaactagacagaatgattctcagaatctcctttgtgatgtgtgcgttcaactcacagagttcaacctttcttttcatagagcagttgggaaacactctgtttgtaaagtctgcaagtggatattcagacttctttgaggccttcgttggaagcgggatttcttcatgttctgctagacagaagaattctcagtaacttctttgtgttgcgtgtattcaactcacagagttgaacgatcctttacacagaggagacttgaaacactctttttgtggaatttgcaagtggagattacagccgctttgaggtcaatggtagaaaaggaaatatcttcgtataaagactagacagaatgattctcagaaactcctttgtgatgtgtgcgttcaactcacagagcttaacctttcttttcatagagcagttaggaaacactctgtttgtaaagtctgcaagtggatattcagacacctttgaggccttcgttggaaacgggatttcttcatgttctgctagacacaagaattcccagtaacttccttgtgttgtgtgtgttcaactcacagagttgaactttgatttacacagagcagatttgaaacactctttttgtggaatttgcaagaggagatttcaagcgctttgaggccaaaggcagaaaaggaaatatcttcgtataaaaactagacagaatcattctcagaaactgctctgcgatgtgtgcgttcaactctcagagtttaacttctcttttcattcagcagtttggaaacactctgtttgtaaagtctgcacgtggataacttgaccacttagaggccttcgttggaaacgggtttttttcatgtaaggctagacagaagaattcccagtaacttccttgtgttgtgtacattcaactcacagagttgaacgatcccttagtcagagcagatttgaaacactctttttgtgcaattggcaagtggagacttcaagcgctttaaggtcaatggcagaaaaggaaatatcttcgtttcaaaactagacagaatcattcccacaaactgcgttgtgatgtgttcgttcatctcacagagtttaacctttcttttcatagagcagttaggaaacagtctgtttgtaaattctgtaagtggatattctgacatcttgtggccttcgttggaaacgggatttcttcatattctgctagacagaaataattctcagtaacttccttgtgttgtgtgtattcaactcacagagttgaacgatcctttacagagagcagacttgaaacactctttttgtggaatttgcaagtggagatttcagccgctttgaggtcaatggtagaataggaaatatcttccaatagaaactagacagaatgattctcagaaactcctttgtgatgtgtgtgttcaactcacagagtttcacctttcttttcatagagcagttaggaaacactctgtttgtaaagtctgcaagtggatattcagacctccttgaggccttcgttggaaacgggatttcttcatattctgctagacagaagaattcccagtaacttccttgtgttgtgtgtgttcaactcacagagttgaactttcatttacccagagcagatttgaaacactctttttgtggaatttgcaagtggagatttcaagcgctttgagaccaaaggcagaaaaggaaatatcttcgtttcaaaactagacagaatcattctcataaactgctctgcgatgtgtgcgttcaactctcagagtttaacttttcttctcattcagcagtttggaaacactctgtttgtaaagtctgcacgtggataatttgaccacttagaggccttcgttggaaacgggtttttttcatgtaaggctagacagaagaattcccagtaacttccttgtgttgtgtacattcaactcacagagttgaacgttcccttagacagagtagatttgaaacactctttttgtgcaactggcaaatggagatttcaagcgctttaaggtcaatggcagaaaaggaaatatcttcgtttcaaaactagacagaatgattctcatgaactcctttgtgatgtgtgcgttcaactcacagagtttaacctttgttttcatagagcagttaggaaacactctgtttgtaaagtctgcaagtggatattcagacctccttgaggccttttttggaaacgggatttcttcatattctgctagacagaagaattctcagtaacttccttgtgttgtgtgtattcaactcacagagttgaatgatcctttacacagaacagtcttgaaacactctttttgtggaatttggaagtggagatttcagccgctttgaggtcaatggtagaataggaaatatcttcctatagaaactagacagaatgattctcagaaactcctttgtgatgtgggcgttcaactcacagagtttaacctttcttttcatagagcagttaggaaacactctgtttgtaaagtctgcaagtggatattcagacatctttgaggctttcgttggaaacgggatttcttcatattctgatatacagaagaattctcagaaacttccttgtgttgtgtgtattcaactcacagagttgaacgatcgtttacacagagcagacttgagacactctttttgtggaatttgtaagtggagatttcagccgctttgaggtcaatggtagagaaggaaatatcttcatataaaaactagacagaatcattctcagaaactactctgcaatgtgtgcgttcaactctcagagtttaactcttcttttcattcagcagtttggaaacactctgtttgtaaactctgcacgtggatattttgaccacttagaggccttcgttggaaacgggtttttttcctgtaaggctagacagaagaattcccagtaacttccttgtgttgtgtgcattcaactcacagagttgaacgttcccttagacagagcagatttgaaacactctatttgtgcaatttgcaagtgtagttttcaagctctttaaggtcaacggcagaaaaggaaatatcttcgtttcaaaactagacagaatcattcccacaaactgcgttgtgatgtgttcgttcaactcacagagtttaacctttcttttcatagagcagttaggaaacagtctgtttgtaaattctgtaagtggatattctgacatcttgtggccttcgttggaaacgggatttcttcatattctgctagacagaagaattctcagtaacttccttgtgttgtgtgtattcaactcacagagttgaacgatcctttacacagagcagacatgaaacactctttttgtggaatttgcaagtggagatttcagccgctttggggtcaatggtagaaaaggaaatatcttcgtataaagactagacagaatgattctcagtaactcctttgtgatgtgtgcgttcaactcacagagtttaacctttcttttcatagagcagttaggaaacactctgtttgtaaagtctgcaagtggatattcagacctctttgaggccttcgttggaaacgggtttttttcatataaggctagacagaagaattcccagtaacttccttgtgttgtgtgtgttcaactcacagagttgaactttcatttacacagagcagatttgaaacactctttttgtggaatttgcaagtggagatttcaagcgctttgaggccaaaggcagaaaaggaaatatcttcgtttaaaaactagacagaatcattctcagaaactgctctgcgatgtgtgcgttcaactctcagagtttaacttttcttttcattcagcagtttggaaacactctgtttgtaaagtctgcacgtggatattttgaccatttagaggccttcgttggaaacgggtttttttcctgtaaggctagacagtagaattcccagtaacttccttgtgttgtgtacattcaactcacagagttgaacgttccctaagacagagcagatttgaaacactctttttgtgcaattggcaagtggttatttcagccgctttgaggtcaatggtagaaaaggaaatatcttcgtataaaaactagacagaatgattctcagaaactcctttgtgatgtgtgcgttcaactcacacagtttaacctttcttttcatagagcagttaggaaacactctgtttgtaaagtctgcaagtggatattcagacctccttgaggccttcgttggaaacgggatttcttcatattatgctagaaagaagaattctcagaaacttcgttgtgttgcgtgttttcaactcacagagttcaacgatcctttacacagagtagacttgaaacactctttttgtggaatttgcaagtggagatttcagccgcttagaggtcaatggtagaaaaggaaatatcttcgtataaaaactagacagaatgattctcagaaactcctttgtgatgtgtgcgttcaactcacagagttcaacctttcttttcatagagcagttgggaaacactctgtttgtaaagcctgcaagtggatattcagacttctttgaggccttcgttggaagcgggatttcttcatattctgctagacagaagaattcccagtaacttccttgtgttgtgtgtgttcaactcacagagttgaacgttccctcagacagagcagatttgaaacactctttttgtggaatttgcaagtggagatttcaagcgctttgaggccaaaggcagaaaaggaaatatcttcgtataaaaactagacagaatcattctcagaaactgctctgcgatgtgtgcgttcaactctcagagtttaacttttcttttcattcagcagtttggaaacactctgtttgtaaagtctgcacgtggataatttgaccacttagaggccttcgttggaaacgggtttttttcatgtaaggctagacagaagaattcccagtaacttccttgtgttgtgtgcattcaactcacagagttgaacgttcccttagacagagcagatttgaaacactctatttgtgcaatttgcaagcgtagatttcaagcgctttaaggtcaatggcagaaaaggaaatatcttcgtttcaaaactagacagaatcattcccacaaactgcgttgtgatgtgttcgttcaactaacagagtttaacctttctgttcatagagcagttaggaaacactctgtttgtaaagtctgtaagtggatattctgacatcttgtggccttcgttggaaacgggatttcttcatattctgctagacagaagaattctcagtaacttccttgtgttgtgtgtattcaactcacagagttgaaggatcctttacagagagcaggcttgaaacactctttttgtggaatttgcaagtggagatttcagccgctttgaggtcaatggtagaataggaaatatcttcttatagaaactagacagaatgattctcagaaactcctttgtgatgtgtgtgttcaactcacagagtttaacctttcttttcatagagcagttagtaaacactctgtttataaagtctgcaagtggatattcagacccctttggggccttcgttggaaacgggatttcttcatattatgctagacagaagatttcccagtaacttccttgtgttgtgtgttttcaactcacagagttgaactttcatttacacagagcagatttgaaacacactttttgtggaatttgcaaatggagatttcaagcgctttgaggccaaaggcagaaaaggaaatatcttcgtttcaaaactagacagaatcattctcagaaactgctctgcgatgtgtgcgttcaactctcagagtttaaattttcttttcattcagcagtttggaaacactctgtttgtaaagtctgcacgtggatattttgaccacttagaagccttcgttggaaacgggtttttttcctgtaaggctagacagaagaattcccagtaacttccttgtgttgtgtacattcaactcacagagttgaacgtttccttagacagagcagatttgaaacactctttttgtgcaattggcaagtggagatttcaagcgctttaaggtcaatggcagaaaaggaaatatcttcgtttcaaaactagacagaatcattcccacaaactgcgttgtgatgtgtacgttcaactcacagagtttaacctttctgttcatagagcagttaggaaacactctgtttgtaaagtctgtaagtggatattctgacatcttgtggccttcgttggaaacgggatttcttcatattctgctagacagaataattctcagtaacttccttgtgttgtgtgtattcaagtcacagagttgaacgatcctttacagagagcagacttgaaacactctttttgtggaatttgcaagtggagatttcagccgctttgaggtcaatgttagaaaaggaaatatcttcgtataaagactagacagaatgattctcagaaactcctttgtgatgtgtgcgttcaactcacagagttcaacctttcttttaatagagcagttgggaaacactctgtttgtaaagtctgcaagtggatattcagacttctttgaggccttcgttggaagcgggatttcttcatattcggctagacagaagaattctcggtaacttccttgtgttgtgtgtattcaactcacagagttgaacgatcctttacacagagcggacttgaaacactctttttgtggaatttgcaagtggagatttcagccgcgttgaggtcaatggtagaaaaggaaatatcttcgtataaaaactagacagaatgattctcagaaactcctttgtgatgtgtgcgttcaactcacagagttcaacctttcttttcatagagcagttaggaaacactctgtttgtaatgtctgcaagtggatattcagacctccttgaggccttcgttggaaacgggatttcttcatattatgctagacagaagaattctcagtaacttccttgtgttgtgtgtattcaactgacagacttgaactttcatttagagagagcagatttgaaacactgtttttgtggaatttgcaagtggagatttcaagcgctttggggccaaaggcagaaaaggaaatatcttcgtataaaaagtagacagaatcattctcagaaactgctctgcgatgtgtgcgttcaactctcagagtttaacttttcttttcattcagcagtttggaaacactctgtttgtaaggtctgcacgtggataatttgaccacttagaggccttcgttggaaacgggtttttttcatgtaaggctagacagaagaattcccagtaacttccttgtgttgtgtgcattcaactcacagagttgaacgttcccttagacagagcagatttgaaacactctatttgtgcaatttgcaagtgtagatttcaagcgctttaaggtcaatggcagaaaaggaaatatcttcgtttcaaaactagacagagtgattctcagaaactcctttgtgatgtctgcgttcaactcacagagtttaacgtttcttttcatagagcagttaggaaacactctgtttgtaaagtctgcaagtggatatacagacctccttgaggccttcgttggaaacgggatttcttcatattctgctatacagaagaattctcagaaacttccttgtgttgtgtgtattcaactcacagagttgaacgatcctttacacagaacagacttgagacactctttttgtggaatttgcaagtggagatttcagccgctttgaggtcaatggtagaaaaggaaatatcttcgtataaaaactagacagaatgattctcagaaactcctttgtgatgtgtgcgttcaactcacagagtttaacctttcttttcatagagcagttaggaaacactctgtttgtaaagtctgcaagtggatattcagacatccttgaggctttcgttggaaacgggatttcttcctattctgctagaaagaagaattcccagtaacttccttgtgttgtgtgtgttcgactcacagagttgaactttcatttacacagagcagatttgaaacactctttttgtggaatttgcaagtggagatttcaagcgctttgaggccaaaggcagaaaaggaaatatcttcgtttcaaaactaggcagaatcattctcagaaactgctctgcgatgtgtgcgttcaactctcagagtttaacttttcttttcattcagcagtttggaaacactctgtttgtaaagtctgcacgtggatattttgaccacttagaggccttcgttggtaacgggtttttttcctgtaaggctagacagaagaattcccagtaacttccttgtgttgtgtgcattcaactcacagtagttgaacgttcccttagacagagcagatttgaaacactctatttgtgcaatttgcaagtgtagttttcaagctctttaaggtcaacggcagaaaaggaaatatcttcgtttcaaaactagacagaatgattctcataaactcctttgtgatgtgtgcgttcaactcacagagtttaacttttcttttcatagagcagttaggaaacactctgtttgtaaagtctgcaagtggatattcagacctctttgaggccttcgttggaaacgggatttcttcatattatgctagacaaaataattctcagtaacttccttgtgttgtgtgtattcaactcacagagttgaacgatcctttacacagagcagacttgaaacactctttttgtggaatttgcaagtggagatttcatccaatttgaggtcaatagtagaaaaggaaatatcttcgtagaaaaactagacagaatgattctcagaaactcctttgtgatgtgtgcgttcaactcacagagtttaacctttcttttcatagagcagttaggaaacactctgtttgtaaagtctgcatgtggatattcagacatctttgaggctttcgttggaaacgggatttcttcatattctgctagacagaagaattctcagtaacttccttgtgttgtgtgtattcaactgacacagttgaactttcatttagagagagcagatttgaaacactgtttttgtggaatttgcaagtggagatttcaagcgctttcgggccaaaggcagaaaacgaaatatcttcgtataaaaactagacagaatcattctcagaaactgctctgcgatgtgtgcgttcaactctcagagtttaacttttcttttcattcagcagtttggaaacactctgtttgtaaagtctgcacgtggatattttgaccacttagaggccttcgttggaaacgggtttttttcatgtaaggctagacagaagaattcccagtaacttccttgtgttgtgtacattcaactcacagagttgaacgttcccttagacagagcagatttgaaacactctttttgtgcaattggcaagtggtgatttcagccgctttgaagtctatggtagaaaaggaaatatcttcgtataaaaactagacagaatcattcccacaaactgcgttgtgatgtgttcgttcaactcacagagtttaacctttctgttacatagagcagttaggaaacactctgtttgtaatgtctgtaagtggatattctgacatcttgtggccttcgttggaaacgggatttcttcatattctgctagacagaataattctcagtaactttccttgtgttgtgtgtattcaactcacagagttgaaggatcctttacagagagcaggcttgaaacactctttttgtcgaatttgcaagtggagatttcagccgctttgaggtcaatggtagaataggaaatatcttcttatagaaactagacagaatgattctcagaaactcctttgtgatgtgtgtgttcaactcacagagtttaacctttcttttcatagagcagctagtaaacactctgtttataaagtctgcaagtggatattcagacccctttgaggccttcgttggaaacgggatttcttcatattatgctagacagaagaattcccagtaacttccttgtgttgtgtgtgttcaactcacagagttgaactttcatttacacagagcagatttgaaacactctttttgtggaatttgcaaatggagatttcaagcgctttgaggccaaaggcagaaaaggaaatatctttgtataaaaactagacagaatcattctcagaaactgctctgcgatgtgtgcgttcaactctcagagtttaacttttcttttcattcagcagtttggaaacactctgtttgtaaagtctgcacgtggatatttcgaccacttagaggccttcgttggaaacgggtttttttcctgtaaggctagacagaagaattcccagtaacttccttgtgttgtgtacattcaactcacagagttgaacgttcccttagacagagcagatttgaaacactctttttgtgcaattggcaaatggagatttcaagcgctttaaggtcaatggcaggaaaggaaatatcttcgtttcaaaactagacagaatgattctcagaaaatcctttgtgatgtgtgcgttcaactcacagagtttaacttttcttttcatagagcagttaggaaacactctgtttgtaaagtctgcaagtggatattcagacctctttgaggccttcattggaaacgggatttcttcatattatgctagacagaataattctcagtaacttccttgtgttgtgtgtattcaactcacagagttgaacgatcctttacagagagcagacttgaaacactctttttgtggaatttgcaagtggagatttcagccgctttgaggtcaatggtagaataggaaatatcttcctatagaaactagacagaatgattctcagaaactcctttgtgatgcgtgcgttcaactcacagagtttaacctttcttttcatagagcagttgggaaacactctgtttgtaaagtctgcaagtggatattcagacttctttgaggctttcgttggaaacgggatttcttcatattctgctagaaagaagaattcccagtaacttccttgtgttgtgtgtgttcaactcacagagttgaactttcatttacacagagcagatttgaaacactctttttgtggaatttgcaagtggagatttcaagcgctttgaggctaaaggcagaaaaggaaatatcttcgtataaaaactagacagaatcattctcagaaactgctgcgtgatgtgtgcgatcaacactcagagtttaacttttcttttcattcagcggtttggaaacactctgtttgtaaagtctgcacgtggaaattttgacaacttagagaccttcgttggaaacgggattttttcatgtaaggctagacagaagaattcccagtaacttccttgtgttgtgtacattcaactcacagagttgaacgttcccttagacagagcagatttgaaacactctttttgtgcaattggcaaatggagatttcaagcgctttaaggtcaatgcagaaaaggaaatatcttcgtttcaaaactaggcagaatcattcccacaaactgcgttgtgatgtgttcgttcaactcacagagtttaacctttatgttcatagagcagttaggaaacactctgtttgtaaagtctgtaagtggatattccgacatcttgtggccttcgttggaaacgggatttcttcatattctgctagacggaagaattctcataaacttccttgtgttgtgtgttttcaactcacagagttgaacgatcctttacacagagcagacttgaaacactccttttgtggaatttgcaagtggagatttcagccgctttgaggtcaatggtagaataggaaatatcttcctatagaaactagacagaatgattctcagaaacttctttgtgatgtgtgcgttcaactcacagagtttaacctttcctttcatagagcagttaggaaacactctgtaaactctgcaagtggatattcagacctctttgaggccttcgttggaaacgggatttcttcatactatgctagacagaagaattctcagtaacttccttgtgttgtgtgtattcaactgacagagttgaacattcatttagagagagcagatttgaaacactgtttttgtggaatttgcaagtggagatttcaagcgctttggggccaaaggcagaaaaggtaatatcttcgtataaaaactagacagaatctttctcagaaactgctctgcgatgtatgcgttcaactctcagagtttaacttttcttttcattcagcagtttggaaacactctgtttgtaaagtctgcacgtggatattttgaccacttagaggccttcgttggaaacgggtttttttcctgtaaggctagacagaagaattcccagtaacttccttgtgttgtgtacattcaactcacagagttgaacgttcccttagacagagcagatttgaaacactctttttgtgcaattggcaaatggagatttcaagcgctttaagttcaatggcagaaaaggaaatatcttcgtttcaaaactagacagaatgattctcagaaactcctttgtgatgtgtgcgttcaactcacagagtttaacttttcttttcattcagcagtttggaaacactctgtttgtaaagtctgcacgtggataatttgaccacttagaggccttcattggaaacgggtttttttcatgtaaggctagacagagcaattcccagtaacttccttgtgttgtgtacattcaactcacagagttgaacgttcccttagacagaacagatatgaaacactctttttctgcaattggcaagtggtgatttcagccgctttgaggtcaatggtagaaaaggaaatatcttcgtataaaaactagacagaatgattctcagaaacttcattgtgacgtgtgcgttcaactcacagagtttaacctttcttttcatagagcagttaggaaacactctgtttgtaaagtctgcaagtggatattcagacctctttgaggccttcgttggaaacgggatttcttcatactgtgctagacagaagaattctcagtaacttccttgtgttgtgtgtattcaactcacagagttgaacgatcctttacacagagcggacttgaaacacactttttgtggaacttgcaagtggagatttcagccgcgttgaggtcaatggtagaaaaggaaatatcttcgtataaaaactagacagaatgattctcagaaactcctttgtgatgtgtgtgttcaactcacagagtttaacctttcttttcatagagcagttaggaaacactctgtttgtaaagtctgcaagaggatattcagacctctttgaggccttctttggaaacgggtttttttcatataaggctagacggaagaattcccagtaacttccttgtgttgtgtgtgttcaactcacagagttgaactttcatttacacagagcacatttgaaacactctttttgtggaatttgcaaatggagatttcaagcgctttgaggccaaaggcagaaaaggaaatatcttcgtataaaaactagacagaatcattctcagaaactgctctgcgatgtgtgcgttcaactctcagagtttaacttttcttttcattcagcagttcggaaacactctgtttgtaaagtctgcacgtggataacttgaccacttagaggccttcgttggaaacaggtttttttcacgtaaggttagacggaagaattctcagtaacttccttgtgttgtgtgtattcaactcacagagttgaacgatcctttacacagagcagacttgaaacactctatttgtagaatttgcaagtggagatttcagccgctttgacgtcaatagtagaaaaggaaatatcttcgtagaaaaactagacagaatgattctcagaaactcctttgtgatgtgtgcgttcaactcacagagtttaacctttctgttcatagagcagttaggaaacactctgtttgtaaagtctgcaagtggatattcagatctccttgaggccttcgttggaaacgggatttcttcatattctgctagacagaagaattcccagtaacttccttgtgttgtgtgtgttcaactcacagagttgaactttcatttacacagagcagatttgaaacactctttttgtggaatttgcaaatggagatttcaagcgctttgaggccaaaggcagaaaaggaaatatcttcgtataaaaactagacagaatcattctcagaaactgctctgcgatgtgtgcgttcaactctcagagtttaacttttcttttcattcagcagtttggaaacactctgtaaagtctgcacgtggataacttgaccacttagaggccttcgttggaaacgggtttttttcctgtaaggctagacaaaagaattcccagtaacttccttgtgttgtgtacattcaactcacagagttgaacgttcccttagacagagcagatttgaaacactctttttgtgcaattggcaagtggagatttcaagcgctttgaggtcaatggcagaaaaggaaatatcttcgtttcaaaactagacagaatcattcccacaaactgcgttgtgatgtgttcgttctactcacagagtgtaacctttcttttcatagagcagttaggaaacagtctgtttgaaaattctgtaaggggatattctgacatcttgtggccttcgttggaaacgggatttcttcatattctgctagacagaagaattctcagtaacttccctgtgttgtgtgtattcaactcacagagttgaatgatcctttacacagagcagacttgaaacactctttttgtggaatttgcaagtggagatttcagccgctttgagttcaatggtagaataggaaatatcttcctatagaaactagacagaatgattctcagaaactcctttgtgatgtgtgcgttcaactcacagagtttaacctttcttttcatagagcagttaggaaacactctgtttgtaaagtctgcaagtggatattcagacctctttgaggccttcgttggaaacgggtttttttcatataagctagacagaagaattcccagtaacttccttgtgttgtgtgtgttcaactcacagagttgaactttcatttacacagagcagatttgaaacactctttttgtggaatttgcaagtggagatttcaagcgctttgaggccaaaggcagaaaagttaatatcttcgtttgaaaactagacagaatcattctcagaaactgctgcgtgatgtgtgcgttcaactctaagagtttaactattcttttcattcagcggtttggaaacactctgtttgtaaagtctgcacgtggatattttgaccacttagaggccttcgttggaaacgggttttttgcatgtaaggctagacagaagaattcccagtaacttccttgtgttgtccacattcaactcacagagttgaacgttcccttagacagagcagatttgaaacactctttttgtgcaattggtaagtggtgatttcaggcgctttgaggtcaatggtagaaaaggaaatatcttcgtataaaaactagacagaaatgattctcagaaactcctttgagatgtgtgtgttcaactcacaggagtttaacctttcttttcatagagcagttaggaaacactctgtttgtaaactctgcaagtggatattcagacctctttgaggccttcgttggaaaccggatttcttcatactgtgctagacagaagaattctcattaacttccttgtgttgtgtttattcaactcacagagttgaatgatcctttacacagagcagacttgaaacactctttttgtggaatttgcaagtggagatttcagccgctttgaggtcaatggtagaaaagtaaatatcttcgtataaagactagacagaatgattctcagaaactcctttgtgatgtgtgcgttcaactcacacagtttaacctttcttttcatagagctgttaggaaacactctgtttgtaaagtctgcaagtggatattcagacctccttgaggccttcgttggaaacgggatttcttcatattctgctagaaagaagaattctcagtaacttccttgtgttgtgtgtactcaactcacagagttgaacgatcctttacacaaagcagacttgaaacactcttttagtggaatttgcaagtggagatttcagccgctttgaggtcaatagtagaaaaggaaatatcttcgtagaaaaactagacagaatcatgctcagaaactgctctgcgatgtgtgcgttcaactctcagagtttaacttttcctttcattcagcagtttggaaacactctgtttgtaaagtctgcacgtgcataatttgaccgcttagaggccttcgttggaaacgggtttttttcatgtaaggctagacagaagaattcccagtaacttccttttgttgtgtgcattcaactcacagagttgaacgttcccttagacagagcagatttgaaacactctatttgtgcaatttgcaagtgtagatttcaagcgctttaaggtcaatggcagaaaaggaaatatcttcgtttcaaaactagacagaatcattcccacaaactgcgttgtgatgtgttcgttcaactcacagagtttaacctttctgttcatagagcagttaggaaacactctgtttgtaaagtctgtaagtggatattctgacatcttgtggcgttcgttggaaacgggatttcttcatattctgctagacagaagaattctcagtaacttccttgtgttgtttgtattcaactcacagagtggaacgatcctttacacagagcagacttgaaacactctttttgtggaatttgcaagtggagatttcagccgctttgaggtcaatggtagaaaaggaaatatcttcgtaaaaaaactagacagaatgattctcagaaactcctttgtgatgtgtgcgttcatctcacagggtttaacctttcttttcatagagcagttaggaaacactcggtttgtaaagtctgcacgtggatatttggacttctttgaggccttcgttggaaacgggttttttcatgtaaggctagacagaagaattcccagtaacttcccttgtgttgtgtgtgttgaactcacagagttgaactttcatttagacagagcagatttgaaacactctttttgtggaatttgcaaatggagaattcatgcactttgaggccaaaggcagaaaaggaaatatcttcgtataaaaactagacagaatcattctcagaaactgctgcgtgatgtgcgcgttcaactctcagaatttaacttttcttttcattcagcggtttggaaacactgtgtttgtaaagtctgcacgtggatattttgaccacttagaggccttcgttggaaacgggtttttttcatgtaaggctagacagaagaattcccagtaacttccttgtgttgtgtgcattcaactcacagagttgaacgttcccttagacagagcagatttgaaacactctatttgtgcaatttgcaagtgtagatttcaagcgctttaaggtcagtggcagaaaaggaaatatcttcgtttcaaaactagacagaatcattcccacaaactgcgttgtgatgtgttcgttcaactcacagagtttaacctttctcttcatagagcagttaggaaacactctgtttgtaaagtctgtaagtggatattctgacatcttgtggccttcgttggaaaagggatttcttcatattctgctagacagaagaattctcagtaacttccttgtgttgtgtgtattcaactcacagagttgaacgatcctttacacagagcagacttgaaacacactttttgtggaatttgcaagtggagatttcagccgctttgaggtcaatggtagaataggaaatatcttcctatagaaactagacagacaatgattctcagaaactcctttgtgatgtgtgcgttcaactcacagcagtttaacctttcttttcatagagcagttaggaaacactctgtttgtaaagtctgcaagtggatattcagacctctttgaggccttcgttggaaacgggtttttttcatataaggctagacagaagaattcccagtaacttccttgtgttgtgtgtgttcaactcacagagttgaactttcatttacacagagcagatttgaaacactctttttgtggaatttgcaagtggagatttcaagcgctttgaggccaaaggcagaaaaggaaatatcttcgtttcaaaactggacagaatcattctcagaaactgctctgcgatgtgtgcgttcaactctcagagtttaacttttcttttcattcagcagtttggaaacactctgtttgtaaagtctgcacgtggataatttgaccacttagaggccttcgttggaaacgggtttttttcatgtaaggctagacagaagaattcccaggaacttccttgtgttgtgtacattcaactcacagagttgaacgttcccttagacagagcagatttgaaacactctttttgtgcaattggcaagtggtgatttcagccgctttgaggtcaatggtagaaaaggaaatatgttcgtataaaaactagacagaatgattctcagaaactcctttgtgatgtgtgcgttcaactcacagagtttaacctttcttttcatagagcagttaggaaacactctgtttgtaaactctgcaagtggatatttagacctctttgaggccttcgttggaaacgggatttcttcatactgtgctagacagaagaattctcagaaacttccttgtgttgtgtgttttcaactcacagagttgaacgatgctttacactgagtagacttgaaacacactttttgtgtaatttgcaagtggagatttcagccgctttgagttcaatggtagaaaaggaaatatcttcgtataaaaactagacagaatgattctcagaaacttctttgtgatgtgtgcgttcaactcacagagtttaacctttcttttcatagagcagttaggaaacactctgtttgtaaagtctgcaagtggatattcagacctccttgaggccttcgttggaaacgggtttttttcatataaggctagacagaagaattctcagtaacttccttgtgttgtgtgtattcaagtgacagagttgaactttcatttagagagagcagatttgaaacactgtttttgtggaatttgcacgtggagatttcaagcgctttggggccaaaggcagaaaaagatatatcttcgtataaaaactagacagaatcattctcagaaactgctgcgtaatgtgtgcgttcaactctcagagtttaacttttcttttcattcagcggtttggaaacactctgtttgtaaagtctacacgtggaaattttgaccacttagaggccttcgttggaaacgggtttttttcatgtaaggctagacagaagaattcccagtaacttccttgtgttgtgtgcattcaactcacagagttgaacgttcccttagacagagcagatttgaaacactctatttgtgcaatttgcaagtgtagttttcaagctctttaaggtcaacggcagaaaaggaaatatcttcgtttcaaaactagacagaatgattctcataaactcctttgtgatgtgtgcgttcaactcacagagtctaacctttcttttcatagagcagttaggaaacactctgtttgtaaagtctgcaagtggatattcagacctccttgaggccttcgttggaaacgggatttcttcatattctgctagacagaagaattctcagtaacttccttgtgttgtgtttattcaactcacagagttgaatgatcctttacacagagcagacttgaaacactctttttgtggaatttgcaagtggagatttcagccgctttgaggtcaatggtagaaaagtaaatatcttcgtataaagactagacagaatgattctcagaaacttctttgtgatgtgtgcgttcaactcacagagtttaacctttcttttcatagagcagttaggaaacactctgtttgtaaactctgcaagttgatattcagacctctttgaggccttcgttggaaacgggatttcttcatactatgctagacagaagaattctcagtaacttccgcgtgttgtgtgtattcaactcacagagttgaacgatcctttacacagagcagacttgaaacactctttttgtggaatttgcaagtggagatttcagccgctttgaggtcaaaggtagaaaaggaaatatcttcctataaaaactagacagaatcattcccacaaactgcgttgtgatgtgttcgttcaactcacagagtttaacctttcttttcatagagcagttaggaaacactctgttggtaaattctgtaagtggatattctgacatcttgtggcctaccgttggaaacgggatttcttcatattctgctagacagaagaattcccagtaacttccttgtgttgtgtgcattcaactcacagagttgaacgttcccttagacagagcagatttgaaacactctatttgtgcaatttgcaagtgtagatttcaagctctttatggtcaacggcagaaaaggaaatatcttcgtttcaaaactagacagaatcattcccacaaactgcgttgtgatgtgttcgttcaactcacagagtttaacctttctgttcatagagcagttaggaaacactctgtttgtaaagtctgcaagtggatattcagacctccttgaggccttcgttggaaacgggatttcatcatattatgctagacagaagaattctcagtaacttccttgtgttgtgtgtattcaactcacagagttgaacgatcctttacagagagcagacttgaaacactctttttgtggaatttgcaagtggagatttcagccgctttgaggtcaatggtagaaaaggatatatcttcgtataaagaatagacagaatgattctcagaaactcctttgtgatgtgtgcgttcaactcacagagtttcacctttcttttcatagagcagttaggaaacactctgtttgtaaagtctgcaagtggatattcagacctccttgaggccttcgttggaaacgggatttcttcatattctgctagacagaagaattcccagtaacttccttgtgttgtgtgtgttcaactcacagagttgaactttcatttacacagagcagatttgaaacactctttttgtggaatttgcaaatggagatttcaagcgctttgaggccaaagacagaaaaggaaatatcttcgtataaaaactagacagaatcattctcagaaactgctgcgtgatgtgtgcgttcaactctcagagtttaacttttcttttcattcagcggtttggaaacactctgtttgtaaattctgcacgtggaaattttgaccacttagaggccttcgttggaaacgggtttttttcatgtaaggctagacagaagaattcccagtaacttccttgtgttgtgtgcattcaactcacagagttgaacgttcccttagacagagcagatttgaaacactctatttgtgcaatttgcaagtgtagatttcaagcgctttaaggtcaacggcagaaaaggaaatatcttcgtttcaaaactagacagaatgattctcagaaactcctttgtgatgtgtgcgttcaactcacagagtttaacctttctgttcatagagcagttaggaaacactctgtttgtaaagtctgcaagtggatattcagacctcctttaggccttcgttggaaacgggatttcttcatattctgctagacagaagaattctcagtaacttccttgtgttgtgtgtattcaactcacagagttgaacaatcctttacacagagcagacttgaaacactctttttgtggaatttgcaagtggagatttcagccgctttgaggtcaatggtagaaaaggaaatatcttcgtataaagactagacagaatgattctcagaaactcctttgtgatgtgtgcgttcaactcacagagtttaaactttcttttcatagagcagttaggaaacactctgtttgtaaagtctgcaagtggatattcacacatccttgaagctttcgttggaaacgggatttcttcatattctgctagaaagaagaattcccagtaacttccttgtgttgtgtgtgttcaactcacagatttgaactttcatttacacagagcagatttgaaacactctttttgtggaatttgcaagtggagatttcaagcgctttgaggccaaaggcagaaaaggaaatatcttcgtttcaaaactagacagaatcattctcagaaactgctgcgtgatgtgtgcgttcaactctcagagtttaacttttcttttcattcagcggtttggaaacactctgtttgtaaagtctgcacgtggaaattttgaccacttagaggccttcgttggaaacgggtttttttcatgtaaggctagagagaagaattcccagtaacttccttgtgttgtgtgcattcaactcacagagttgaacgttcccttagacagagcagatttgaaacactctatttgtgcaatttgcaagtgtagatttcaagcgctttaaggtcaacggcagaaaaggaaatatcttcgtttcaaaactagacagaatgattctcagaaactcctttgtgatgtgtgtgtccaactcacagagtttaacctttcttttcatagagcagttaggaaacactctgtttgtaaagtctgcaagaggatattcagacctctttgaggccttcgttggaaacgggtttttttcctgtaaggctagacagaagaattcccagtaacttccttgtgttgtgtgtgttcaactcacagagttgaactttcatttacacagagcagatttgaaacactctttttgtggaatttgcaaatggagatttcagccgcgttgaggtcaatggtagaaaaggaaatatcttcgtttcaaaactagacagaatgattctcagaaactcctttgtgatgtgtgcgttcaactcacagagtttaacctttcttttcatagagcagttaggaaacactctgtttgtaaagtctgcacgtggatatttggacttctttgaggccttcgttggcaacggggttttttcatataaggctagacagaagaattctcagtaacttccttgtgttgtgtgtattcaactgacagagttgaactttcatttagagagagcagatttgaaacactgtttttgtggaatttgcaagtggagatttcaagcgctttggggccaaaggcagaaaaggaaatatcttcgtataaaaactcagcagaatcattctcagaaactgctctgcgatgtgtgcgttcaactctcagagtttaacttttcttttcattcagcagttaggaaacactctgtttgtaaagtctgcaagtggatattcagacctctttgaggccttcgttggaaacgggtttttttcatataaggctagacagaagaattcccagtaacttccttgcgttgtgtacattcaactcacagagttgaacgttcccttagacagagcagatttgaaacactctttttgtgcaattggcaagtggagatttcaagcgctttaaggtcaatggcagaaaaggaaatatcttcgtttcaaaactagacagaatgattctcagaaactcctttctgatgtgtgcgttcaactcgcagagtttaacttttcttttcatagagcagttaggaaacactctgtttgtaaagtctgcaagtggatattcagacctctttgaggccttcgttggaaacgggatttcttcatattctgctagacagaagaattctcagaatcttcccttgtgttgtgtgtattcaactcacagagttgaaagaccctttacacagagcggacttgaaacactctttttgtggaatttgcaagtggagatttcagccgcgttgaggtcaatggtagaaaaggaaatatcttcgtataaaaactagacagaatgattctcagaaactcctttgtgatgtgtgcgttcaactcacagagtttaacctttctattcatagagtagttaggaaacactctgtttgtaatgtctgcaagtggatattttgacctctttgaggccttcgttggaaacgggtttttttcatgtaaggctagacagaagaattcccagtaacttccttgtgttgtgtgtgttcaactcacagagttgaactttcatttacacagagcagatttgaaacactctttttgtggaatttgcaagtggagacttcaagcgctttgaggccaaaggcagaaaaggaaatatcttcgtttcaaaactagacagaatcattctcagaaactgctgcatgatatgtgcgttcaactctcagagtttaacttttcttttcattcagcggtttggaaacactctgtttgtaaagtctgcacgtggatattttgaccacttagaggccttcgttggaaacgggtttttttcatgtaaggctagacagaagaattctcagtaacttccttgtgttgtgtgtattcaactcacagagttgaacgatcctttacacagagcagacttgaaacactctatttgtgcaatttgcaagtgtagatttcaagcgctttaaggtcaatggcagaaaaggaaatatcttcgttttaaaactagacagaatcattcccacaaactgcgttgtgatgtgttcgttcaactcacagagtttaacctttctgttcatagagcagtgaggaaacactctgtttgtaaagtctgtaagtggatattctgacatcttgtggccttcgttggaaacaggatttcttcatattctgctagacagaataattctcagtaacttccttgtgttgtgtgtattcaactcacagagttgaaggatcctttagagagagcaggcttgaaacactctgtttgtcgaatttgcaagtggagatttcagccgctttgaggtcaatggtagaataggaaatatcttcttatagaaactagacagaatgattctcagaaacttctttgtgatgtgtgcgttcaactcacagagtttaacctttcttttcatagagcagttaggaaacactctgtttgtaaactctgcaagtggatattcagacctgtttgaggccttcgttggaaacgggatttcttcatactatgctagacagaagaattctcagtaacttccttgtgttgtgtgtattcaactcacagagttgaacgatcctttacacagagcagacttctaacactctttttgtggaatttgcaagtggagatttcagccgctttgaagtcaaaggtagaaaaggaaatatcttcctataaaaactagacagaatgattctcagaaactcctttgtgatgtgtgcgttcaactcacagagattaacctttcttttcatagagcagttaggaaacactctgtttgtaaagtcttcaagtggatattcagacctctttgaggccttcgttggaaacgggatttcttcatattctgctagacagaagaattctcagtaacttccttgtgttgtgtgtattcaactcacagagttgaacggatcctttacacagagcagacttgaaacactctatttgtgcaatttgcaagtgtagatttcaagcgctttaaggtcaatggcagaaaaggaaatatcttcgttttaaaactagacagaaatcattcccaaaaactgcgttgtgatgtgttcgttcatctcacagagtttaacctttcttttcatagagcagttaggaaacagtctgtttgtaaattctgtaagtggatattctgacatcttgtggccttcgttggaaacgggatttcttcatattctgctagacagaataattctcagtaacttccttgtgttgtgtgtattcaactcacagagttgaacggtcctttacacagagcagacttgaaacattctttttgtggaatttgcaagtggagatttcagccgctttgaggtcaatggtagaataggaaatatcttcctatagaaactagacagaatgattctcagaaactcctttgtgatgtgtgcgttcaactcacagagtttaacctttcttttcatagagcagttaggaaacactctgtttgtaaagtctgcaagtggatattcagacctccttgaggccttcgttggaagcgggatttcttcatgttcagctagacagaagaattctcagaaacttccttgtgttgtgtgttttcaactcacagagttgaacgatcctttacacagagcagacttgaaacactctttttgtggaatttgctagtggagatttcagccgctttgaggtcaatggtagaataggaaatatcttcctatagaaactagacagaacgattctcagaaactcctttgtgatgtgtgcgttcaactcacagtagtttaacttttcttttcatagagcagttaggaaacactctgtttgtaaagtctgcaagtggatattcagacctctttgaggccttcgttggaaacgggatttcttcctattctgctagacagaataaatctcagtaacttccttgtgttgtgtgtattcaactcacagagttgaacgatcctttacacagagcagacttgaaacactctttttgtggaatttgcaagtggagatttcagccgctttgaggtcaatagtagaaaaggaaatatcttcgtagaaaaactagacagaatcattcccacaaactgcgctgtgatgtgctcgttcaactcacagagtttaacctttctgttcatagagcagttaggaaacactctgtttgtaaagtctgtaagtggatattctgacatcttgtggccttcgttggaaacgggttttcctcatattctgccagacagaagaattctcagtaacttccttgtgttgtgtgtattcaactcacagagttgaacgatcctttacacagagcagacttgaaactctctttttgtggaatttgcaagtggagatttcagccgctttgaggtcaatggtagaataggaaatatcttcctatagaaaatagacagaatgattctcagaaactcctttgtgatgtgtgcgttcaactcacagattttaacctttcttttcatagagcagttaggaaacactctgcttgtaaagtctgcaagtggatattcagccctctttgaggccttcgttggaaacgggtttttttcatataaagctagacagaaggattcccagtaacttccttgtgttgtgtgtgttcaactcacagagttgaactttcatttacaatgagcagatttgaaacactctttttgtggaatttgcaagtggagatttcaagcgctttgaggccaaaggcagaaaaggaaatatcttcgtataaaaactagacagaatcattctcagaaactgctctgtgatgtgtgcgttcaactctcagagtttaacttttcttttcattcagcagtttggaaacactctgtttgtaaagtctgcacgtggataatttgatcacttagaggccttcgttggaaaggggtttttttcatgtaaggctagacagaagaattcccagtaacttccttgtgttgtgtgcattcaactcacagagttgaacgttcccttagacagagcagatttgaaacactctatttgtgcaatttgcaagtgtagttttcaagctctttaaggtcaacggcagaaaaggaaatatcttggtttcaaaactagacagaatgattctgagatatcctttgtgatgtgtgcgttcaactcacagagttcaacctttcttttcatagagcagttaggaaacactctgtttgtaaagtctgcaagtggatattcagacctccttgaggccttcgttggaaacgggatttcttcatattatgctagacagaggaattctcaggaacttccttgtgttgtgtgtattcaactcacagagttgaacgatcctttacacagagcagacttgaaacactctttttgtggaatttgcaagtggagatttcagccgctttgagttcaatggtagaataggaaatatcttcctatagaaactacacagaatgattctcagaaactcctttgtgatgtgtgcgttcaactcacagagtttaacctttcttttcatagagcagttaggaaacactctgtttgtaaagtctgcaagtggatattcagacctctttgaggccttcgttggaaacgggatttcttcctattctgctagacagaagaattctcagtaacttccttgtgttgtgtgtattcaactcacagagttgaacgatcctttacacagagcagacttgagacactctttttgtggaatttgcaagtggagatttcagccgctttcaggtcaatagtagaaaaggaaatatcttcgtagaaaaactagacagaatcattctcagaaactgctgcgtgatgtgtgcgttcaactctcagagtttaacttttcttttcattcagcgttttggaaacactctgtttgtaaagtctgcacgtggatattttgaccacttagaggccttcgttggaaacgggttttttttcatgtaaggctagacagaagaattcccagtaacttccttgtgttgtgtgcattcaactcacagagttgaacgttcccttagacagagcagatttgaaacactctatttgtgcaatttgcaagtgtagatttcaagcgctttaaggtcaacggcagaaaaggaaatatcttcgtttcaaaactagacagaatgattctcagaaactcctttgtgatgtgtgcgttcaactcacagagtttaacctttctgttcatagagctgttaggaaacactctgtttgtaaagtctgcaagtggatattcagacctccttgaggccttcgttggaaacgggatttcttcctattctgctagacagaataattctcagtaacttccttgtgttgtgtgtattcaactcacagtagttgaacgatcctttacacagagcagacttgaaacactctttttgtggaatttgcaagtggagatttcagccgctttgaggtcaatagtagaaaaggaaatatcttcgtagaaaaactagacagaatgattctcagaaactccttgttgatgtgtgcgttcaactcacagagtttaacttttcttctcatagagcagttaggaaacactctgtttgtaaagtctgcaagtggatattcagacctctttgaggccttcgttggaaacgggttttcttcatattatgctagacagaagaattcccagtaactttccttgtgttgtgtgtgttcaactcacagagttgaactttcatttacacagagcagatttgaaacactctttttgtggaatttgcaagtggagatttcaagcgctgtgaagccaaaggcagaaaaggaaatatcttcgtataaaaactagacagaatcattctcagaaactgctctgcgatgtgtgcgttcaactctcagagtttaacttttcttttcattcagcagtttggaaacactctgtttgtaaagtctgcacgtggataatttgaccccttagaggccttcgttggaaacgggtttttttcatgtaaggctagacagaagaattcccagtaacttccttgtgttgtgtgcattcaactcacagagttgaacgttcccttagacagagcagatttgaaacactctatttgtgcaatttgcaagtgtagatttcaagcgctttaaggtcaaaggcagaaaaggaaatatcttcgtttcaaaactagacagaaatcattcccacaaactgcgttgtgatgtgttcgttcaactcacagtagtttaacctttctgttcatagagcagttaggaaacactctgtttgtaaagtctgtaagtggatattctgacatcttgtggccttcgttggaaacgggatttcttcatattctgctagacagaagaattctcagtaacttccttgtgttgtgtgtattcaactcacagagttgaacgatcctttacacagagcagacttgaagtactctttttgtggaatttgcaagtggagatttcagccgctttgaggtcaatggtagaaaaggaaactaccttcatataaagactagacagaatgattctcagaaaatcttttgtgatgtgtgcgttcaactcacagagtttaacttttcttctcatagagcagttaggaaacactctgtttgtaaagtctgcaagtggatattcagacctctttgaggccttctttggaaacgggatttcttcatattctgctagacagaagaattcccagtaacttccttgtgttgtgtgtgttcgactcacagagttgaactttcatttacacagagcagatttgaaacactctttttgtggaatttgcaagtggagatttcaagcgctttgaggccaaaggcagaaaaggaaatatctttgtttcaaaactagacagaatcattctcagaaactgctctgcgatgtgtgcgttcaactctcagagtttaacttttcttttcattcagcagtttggaaacactctgtttgtaaagtctgcacgtggatattttgaccacttagtggccttcgttggaaacgggttttcttcctgtaagtctagacagaagaattcccagtaacttccttgtgttgtgtacattcaactcacagagttgaacgttcccttagacagagcagatttgaaacactctttttgtgcaattggcaaatggagatttcaatcgctttaaggtcaatggcagaaaaggaaatatcttcgtttcaaaactagacagacatcattcccacaaactgcgttgtgatgtgttcgttcatctcacagagtttaacctttcttttcatagagcagttaggaaacagtctgtttgtaaattctgtaagtggatattctgacatcttgtggccttcgttggaaacgggatttcttcatattctgctagacagaagaattctcagaatcttccttgtgttgtgtgtattcaactcacagagttgaatgatggtttacacagagcagatttgaaacactctttttgtggaatttgcaagtggacatttcagccgctttgaggtcaatggtagaaaaggaaatatcttcgtataaaaactagacagaatgattctcagaaactcctttgtgatgtgtgtgttcaactcacagagtttaacctttcttttcatagaacagttagtaaacactctgtttataaagtctgcaagtggatattcagacccatttgaggccttcgttggaaacgggatttcttcatattatgctagacagaagaattcccagtaacttccttgtgttgtgtgtgttcagctcacagaggtgaactttcatttacacagagcagatttgaaacactctttttgtggaatttgcaagtggagatttcaagcgctttgaggccaaaggcagaaaaggaaatatcttcgtataaaaagtagacagaatcatactcagaaactgctgcgtgatgtgtgcgttcaactctcagagtttaacttttcttttcattcaacggtttggaaacactctgtttgtaaagtctgcacgtggatattttgaccacttagaggccttcgttagaaacgggtttttttcatgtaaggctagacagaagaattcccagtaacttccttgtgttgtgtacattcaactcacagagttgaacgttcccttagacagagcagatttgaaacacactttttgtgcaattggcaagtggtgatttcagccgctttgaggtcaatggtagaaaaggaaatatcttcgtataaaaactagacagaatcattcccacaaactgcgttgtgatgtgttcgttcaactcacagagtttaacctttcttttcatagcgcagttaggaaacagtctgtttgaaaattctgtaagtggatattctgacatcttgtggccttcgttggaaacgggatttcttcatattctgctagacagaagaattctcagtaacttccttctgttgtgtgtattcaactcacagagttcaacgattctttacacagagcagacttgagacactgttttcgtggaatttgcaagtggagatttcaaccgctttgaggtcaattgtagaaaaggaaatatcttcgtataaaaactagacagaacgattctcagaaactcctttgtgatgtgtgcgttcaactcacagagtttaacttttcttttcatagagcagttaggaaacactctgtttgtaaagtctgcaagtggatattcagacccctttgaggccttcgttgaaaacgggatttcttcatattctgctagacagaagaattcccagtaacttccttgtgttgtgtgtgttcaactcacagagttgaactttcatttacacagagcagatttgaaacactctttttgtggaatttgcaagtggagatttcaagcgctttgaggccaaaggcagaaaaggaaatatattcgtataaaaactagacagaatcattctcagaaactgctctgcgatgtgtgcgttcaactctcagagtttaacttttcttttcattcagcagtttggaaacactctgtttgtaaagtctgcaagtggatattttgacctctttgaggccttcgttggaaacgggtttttttcatgtaaggctagacagaagaattcacagtaacttccttgtgttgtgtacattcaactcacagagttgaacgttcccttagacagagcagatttgaaacactctttttgtgcaattggcaagtggagatttcaagcgctttaaggtcaatggcagaaaaggaaatatcttcctttcaaaactagacagaatcattcccacaaactgcgttgagatgtgttcgttcaactcacagagtttaacctttcttttcatagagcagttaggaaacagtctgtttgtcaattctgtaagtggatattctgacatcttgtggccttcgatggaaacgggatttcttcatattctgctagagagaagaattctcagaatcttccttgtgttgtgtgtattcaactcacagagttgaacgatcctttacacagagcagacttgaaacactctttttgtggaatttgcaagtggagatttcagccgctttgaggtccatggtagaaaaggaaatatcttcgtataaaaactagacagaatgattctcagaaactcctttgtgatgtgtgtgttcaactcacagagtttaacctttcttttcatagagcagttaggaaacactctgtttgtaaagtctgcaagtggatattcagacctcgttgagaccttcgttggaaacgggatttcttcatattctgctagacagaagaattctcagtaacttccttgtgttgtgtttattcaactcacagaattgaatgatcctttacacagagcagacttgaaacactctttttgtggaatttgcaagtggagatttcagccgctttgtggtcaatggtagaaaaggaaatatcttcgtataaagactagacagaatcattctcagaaactgctgcgtgatgtgtgcgttcaactctcagagtttaacttttcttttcattcagcggtttggaaacactctgtttgtaaagtctgcacgtggaaattttgaccacttagaggccttcgttggaaacgggtttttttcatgtaaggctagacagaagaattcccagtaacttccttgtgttgtgtacattcaactcacagagttgaacgttcccttagacagagcagatttgaaacactctttttgtgcaattggcaagtggagatttcaagcgctttgaggtcaatggcagaaaaggaaatatcttcgtttcaaaactagacagaatcattcccacaaactgcgttgtgatgtgttcgttcaactcacagagtttaacctttctgttcatagagcagttaggaaacactctgtttgtaaagtctgcaagtggatattcagacctccttgaggccttcgttggaaacgggatttcttcatattctgctagacagaagtattctcagtaacttccttgtgttgtgtgtattcaactctcagagttgaacgatcctttacacagagcggacttgtaacactctttttgtggaatttgcaagtggagatttcagccgctttgaagtcaaagttagaaaaggaaataacttcctataaaaactagacagaatgattctcagaaactcctttgtgatgtgtgagttcaactcacagagtttaacctttcttttcatagagcagttaggaaacactctgtttctaaagtctgcaagtggatattcagacctctttgaggccttcgttggaaacgggtttttttcatataaggctagagagaagaaatcccagtaacttccttgtgttgtgtgtgttcaactcacagagatgaactctcatttacacagagcagatttgaaactctctttttgtggaatttgcaaatggagatttcaagcgctttgaggccaaaggcagaaaaggaaatatcttcgtataaaaactagacagaatcattctcagaaactgctgcgtgatgtgtgcgttcaactctcagagtttaacttttcttttcattcagcggtttggaaacactcagtttgtaaagtctgcacgtggatattttcaccacttagaggccttcgttggaaacgggttttttttcatgtaaggctagacagaagaattcccagtaacttccttgtgttgtgtacattcaactcacagagttgaacgttcccttagacagagcagatttgaaacactctttttctgcaattggcaagtggagatttcaagcgctttgaggtcaatggcagaaaaggaaatatcttcgtttcaaaactagacagaatcattcccacaaactgcgttgtgatgtgttccttcaactcacagagtttaacctttcttttcatagagcagttaggaaacagtctgtttgtcaattctgtaagtggatattctgacatcttgtggccttcgttggaaacgggatttcttcatattctgctagacagaagaattctcagtaactgccttgtgttgtgtgtattcaactcacagagttgaacgatcgtttacacagagcagacttgaaacactctttttgtggaatttgcaagtggagatttcagccgctttgaggtcaatggtagaataggaaatatcttcctatagaaactagacagaatgattctcagaaactcctttgtgatgtgtgcgttcaactcacagagtttaacctttcttttcatagagcagttaggaaacactctgtttgtaaaggctgcaagtggatattcagacatctttgaggccttcgttggaaaagggatttcttcatgttctgctagaaagaagaattcccagtaacttccttgtgttgtgtgtgttcaactcacagagttgaactttcatttacacagagcagattggaaacactctttttgtggaatttgcaaggggagatttcaagcgctttgaggccaaaggcagaaaaggaaatatcttcgtataaaaactagacagaatcattctcagaaactgctgcgtgatgtgtgcgttcaactctcagagtttaacttttcttttcattcagcagtttggaaacactctgtttgtaaagtctgcacgtggatattttgaccacttagaggccttcgttggaaacgggtttttttcatgtaaggctagacagaagaattcccagtaacttccttgtgttgtgtgcattcaactcacagagttgaacgttcccttagacagagcagatttgaaacactctatttgtgcaatttgcaagtgtagatttcaagctctttaaggtcaatggcagaaaaggaaatatcttcgtttcaaaactagacagaatgattctcagaaactcctttgtgatgtgtgcgttcaactcacagagtttaacctttcttttcatagagcagttaggaaacactctgtttgtaaagtctacaagtggatattcagacatctttgaggctttcgttggaaacgggatttcttcatattctgctggacagaagaattctcagaaacttcgttgtgttgtgtgttttcaaatcacagagttcaacgatcctttacacagagtagacttgaaacactctttttgtggaattggcagggtggagatttcagccgctttcaggtcaatggtagaaaaggaaatatcttcgtataaaaactagacagaatgattgtcagaaactcctttgtgatgtgtgcgttcaactcacagagtttaacctttcttttcatagagcagttaggaaacactctgtttgtaaagtctgcaagtggatattcagacctctttgaggccttcgttggaaacgggatttcttcatattctgctagacagaagaattcccagtaacttccatgtgttgtgtgtgttcaactcacagagttgaactttcatttacacagagcagatttgaaacactctttttgtggaatttgcaaatggagatttcaagcactttgaggccaaaggcagaaaaggaaatatcttcgtagaaaaactagacagaatcattctcagaaactgctctgcgatgtgtgcgttcaactctcagagtttaacttttcttttcattcagcagtttggaaacactctgtttgtaaagtctgcacgtggataacttgaccacttagaggtcttcgttggaaacgggtttttttcatgtaaggctagacagaagaattcccagtaacttccttgtgttgtgtacattcaactcacagagttgaacgttcccttagacagagcagatttgaaacactctttttgtgcaattggcaagtggtgatttcagccgctttgaggtcaatggtagaaaaggaaatatcttcgtataaaaactagacagaatcattcccacaaactgcgttctgatgtgttcgttcaactcacagagtttaacctttctgttcatagagcagttaggaaacactctgtttgtaaagtctgtaagtggatattctgacatcttgtggccttcgttggaaacgggatttcttcatattctgctagacagaagaattctcagtaacttccttgtgttgtgtgtattcaacacacagagttgaacgatgctttacacagagcagacttgaaacactctttttgtggaatttgcaagtggagatttcagccgctttgaggtcaatggtagaaaaggaaatatcttcgtataaagactagacagaatgattctcagaaactcctttgtgatgtgtgcgttcaactcacagagtttaacgtttcttttcatagagcagttaggaaacactctgtttgtaatgtctgcaagtggatattcagacccctttgaggccttcgttggaaacgggatttcttcatattatgctagacagaaagaattcccagtaacttccttgtgttgtgtgtgttcaactcacagagttgaactttgatttacacagagcagatttgaaacactctttttgtggaatttgcaagtggagatttcaagcgctttgaggccaaaggcagaaaaggaaatatcttcgtataaaaactagacagatcattctcagaaactgctctgcgatgtgtgcgttcaagtctcagagtttaacttttcttttcattcagcagtttggaaacactctgtttgtaaagtctgcacctggataatttgaccacttagaggccttcgttggaaacgggtttttttcctgtaaggctagacagaagaattcccagtaacttccttgcgttgtgtacattcaactcacagagttgaacgttcccttagacagagcagatttgaaacactctttttgtgcaattggcaagtggagatttcaagcgctttaaggtcaatggcagaaaaggaaatatcttcgtttcaaaactagacagaatgattctcagaaactcctttgtgatgtgtgcgttcaactcacagagtttaacctttcttttcatagagcagttaggaaacactctgattgtaaagtctgcaagtggatattcagaactccttgaggccttcgttggaaacgggatttcttcatattatgctagacagaataattctcagtaacttccttgtgttgtgtgtattcaactcacagagttgaacgatcctttacacagagcagacttgaaacactctatttgtagaatttgcaagtggagatttcagccgctttgaggtcaatagtagaataggaaatatcttcgtagaaaaactagacagaatgattctcagaaactcctttgtgatgtgtgcgttcaactcacagagtttaacatttcttttcatagagcagttaggaaacactctgtttgtaaagtctgcaagtggatattcagacctccttgaggccttcgttggaaacgggatttcttcatattatgctacacagaagaattctcagtaacttccttgtgttgtgtgtattcaactgacagagttgaactttcatttagagagagcagatttgaaacactgtttttgtggaatttgcaattggagatttcaagcgctttggggccaaaggcagaaaaggaaatatcttcgtataaaaactagacagaatgattctcagaaagtcctttgtgatgtgtgcgttcaactcacagagtttaacctttctgttcatagagctgttaggaaacactctgtttgtaaagtctgcacgtggaaattttgaccacttagaggccttcgttggaaacgggtttttttcatgtaaggctagacagaagaattcccagtaacttccttgtgttgtgtacattcaactcacaggagttgaacgttcccttagacagagcagatttgaaacactctttttgtgcaattggcaaatggagatttcaagcgctttaagttcaaaggcagaaaaggaaatatcttcgtttcaaaactagacagaatcattcccacaaactgcgttgtgatgtgttcgttcaactcacagagtttaacctttcttttcatagagcagttaggaaacagtctgtttgtcaattctgtaagtggatattctgacatcttgtggcattcgttggaaacgggatttcttcatattctgctagacagaagaattctcagaatcttccttgtgttgtgtgtattcaactcacagagttgaacgatcctttacacagagcagacttgaaacactctttttgtggaatttgcaagtggagatttcagccgctttgaggtccatggtagaaaaggaaatatcttcgtataaaaactagacggaatgattctcagaaactcctttgtgatgtgtgcgttcaactcacagagttaaacctttcttttcatagagcagttaggaaacactctgtttgtaaagtctgcaagtggatattcagacctccttgaggccttcgttggaaacgggatttcttcatattctgctagacagaagaattctcagtaacttccttttgttgtgtgtattcaactgacagagttgaactttcatttagacagagcagatttgaaacactctttttctggaatttgcaagtggagatttcaagcgctttgaggccaaaggcagaaaaggatatatcttcgtataaaaactagacggaatcattctcagaaactgctctgcgatgtatgcgttcaactctcagagtttaacttttcttttcattcagcagtttggaaacactctgtttgtaaattctgcacgtggatattttgaccacttagaggccttcgttggaaacgggtttttttcatgtaaggctagacagaagaattcccagtaacttccttgtgttgtgtgcattcaactcacagagttgaacgttcccttagaccgagcaggtttgaaacactctatttgtgcaatttgcaagtgtagttttcaagctctttaaggtcaacggcagaaaaggaaatatcttcgtttcaaaactagacagaatcattcccacaaactgcgttgtgatgtgttcgttcaactcacagagtttaacctttctgttcatagagcagttaggaaacactctgtgtgtaaagtctgcaagtggatattcagacctctttgaggccttcgttggaaacgggatttcttcatattctgctagacagaagaattctcagtaacttccttgtgttgtgtgtattcaactcatagagttgaacgatcctttacacagagcagacttgaaacactctatttgtagaatttgcaagtggagatttcagccgctttgaggtcaatagtagaaaaggaaatatcttcgtagaaaaactagacagaacgattctcagaaactcctttgtgatgtgtgcgttcaactcacagagtttaaactttcttttcatagagcagttaggaaacactctgtttgtaaagtctgcaagcggatattcagacctctttgaagccttcgttggaaacgggatttcttcatattatgctagacagaagaattcccagtaacttccttgtgttgtgtgtgttcaactcacagagttgaactttcatttacacagagcagatttgaaacactctttttgtggaatttgcaattggagatttcaagcgcttggaggccaaaggcagaaaaggaaatatcttcgtataaaaactagacagaatcattctcagaaactgctgcgtgatgtgtgcgttcaactctcagagtttaacttttcttttcattcagcggtttggaaacactctgtttgtaaagtctgcacgtgtatattttgaccacttagaggccttcgttggaaacgggttttttcatgtaaggctagacagaagaattcccagtaacttccttgtgttgtgtgcattcaactcacagagttgaacgttcccttagacagagcagatttgaaacactctatttgtgcaatttgcaagtgtagatttcaagcactttaaggtcaatggcagaaaaggaaatatcttcgtttcaaaactagacagaatgattctcagaaactcctttgtgatgtgtgcgttcaactcacagagtttaacctttcttttcatagagcagttaggaaacactctgttggtaaagtctgcaagtggatattcagacctctttgaggccttctttggaaacggaatttcttcatattctgctagacagaagaattctcagaaacttcctggtgttgcgtgttttcaactcacagagttcaacgatcctttacacagagtagacttgaaaaactctttttgttgaattggccagtggagatttcagccgctttgaggtcaatggtagaaaaggaaatatcttcgtataaaaactagacagaatcattctcagaaactcctttgtgatgtgtgtgcccaactcacagagtttaacctttcttttcatagagctgttaggaaacactctgtttgtaaagtctgcaagaggatattcagacctctttgaggccttcgttggaaacgggtttttttcatataaggctagacagaagaattctcagtaacttccttgtgttgtgtgtattcaactgacggagttgaactttcatttagagagagcagatttgtaacactgtttttgtggaatttgcaagtggagatttcatgcgctttggggccaaaggcagaaaaggaaatatcttcgtataaaaactagacagaatcattctcagaaactgctctgcgatgtgtgcgttcaactctcagagtttaacttttcttttaattcagcagtttggaaacactctgtttgtaaagtctgcacgtggatattttgaccacttagaggccttcgttggaaacgggtttttttcctgtaaggctagacagaagaattcccagtaacttccttgtgttgtgtgcattcaactcaaagagttgaacgttcccttagacagagcagatttgaaaaactctatttgtgcaatttgcaagtgtagatttcaagcgctttaaggtcaatggcagaaaaggaaatatcttcgtttcaaaactagacagaatcattcccacaaactgcgttgtgatgtgttcgttcaactcacagagtttaacctttctgttcatagagcagttaggaaacactctgtttgtaaagtctgtaagtggatattctgacatcttgtggccttcgttggaaaagggatttcatcatattctgctagacagaagaattctcagtaacttccatgtattgtgtgtattcaactcacagagttgaacgatcctttacacagagcagacttgaaacactctttttgtgaaatttgcaagtggagatttcagccgctttgtggtcaatggtagaataggaaatatcttcctatagaaactagacagaatgattctcagaaactcctttgtgatgtgtgcgttcaactcacagagtttaacctttcttttcatagagccgttaggaaacactctgtttgtaaagtctgcaagtggatattcagacctccttgaggccttcgttggaaacgggatttcttcatattatgctagacagaagaattcccagtaacttccttgtgttgtgtgtgttcaactcacagagttgaactttcatttagacagagcagatttgaaacactctttttgtggaatttgcaagtggagatttcaagcgctttgaggccaaaggcagaaaaggaaatatcttcgtataaaaactagacagaatcattctcagaaactgctctgcgatgtgtgcgttcaactctcagagtttaacttttcttttcattcagcagtttggaaacactctgtttgtaaagtctgcacgtggatattttgaccacttagaggccttagttggaaacggttttttttcctgtaaggctagacagaagaattcccagtaacttccttgtgttgtgtacattcaactcacagagttgaacgttcccttagacagagcagatttgaaacactctttttgtgcaattggcaaatggagatttcaagcgctttaaggtcaatggcaggaaaggaaatatcttcgtttcaaaactagacagaatcattcccacaaactgcgttgtgatgtgttcgttcaactcacagagtttaacctttcttttcatagagcagttaggaaacagtctgtttgtcaattctgtaagtggatattttgacatcttgtggccttcgttggaaacgggatttcttcatattctgctagacagaagaattctcagtaacttccttgtgttgtgtgtattcaactcacagagttgaaggatcctttacagagagcaggcttgaaacactctttttgtcgaatttgcaagtggagatttcagccgctttgaggtgaatggtagaataggaaatatcttcttatagaaactagacagaatgattctcagaaacttctttgtgatgtgtgccttcaactcacagagtttaacctttcttttcatagagcagttaggaaacactctgtttgtaaactctgcaagtggatattcagacctctttgaggccttcgttggaaacgggatttctccatactatgctagacagaagaattcccagtaacttccttgtgttgtgtgtgttcaactcacagagttgaactttcatttacacagagcagatttgaaacactctttttgtggaatttacaagtggagatttcaagcgctttgaggccaaaggcagaaaaggaaatatcttcgtataaaaactagacagaatcattctcagaaagtgctctgcgatgtgtgcgttcaactctcagagtttaactttgcttttcattcagcagtttggaaacactctgtttgtaaagtctgcacgtggataatttgaccacttagaggccttcgttggaaacgggtttttttcatgtaaggctagacagaagaattcccagtaacttccttgtgttgtgtgctttcaactcacagagttgaacgttcccttagacagagcagatttgaaacactctatttgtgcaatttgcaagtgtagatttcaagcgctttaaggtcaatggcagaaaaggaaatatcttcgtttcaaaactagacagaatcattcccacaaactgcgttgtgatgtgttccttcatctcacagagtttaacctttcttttcgtagagcagttaggaaacagtctgtttgtaaattctgtaagtggatattctgacatcttgtggccttcgttggaaacgggatttcttcatattctgctagacagaataattctcagtaacttccttgtgttgtgtgtattcaactgtcagagttgaacgatcctttacagagagcagacttgaaacactctttttgtggaatttgcaagtggagatttcagccgctttgaggtcaatggtagaataggaaatatcttcctatacaaactagacagaatgattctgagaaactcctttgtgatgtgggcgttcaactcacagagtttaacctttcttttcatagagcagttaggaaacacactgtttgtaaagtctgcaagtggatattcagacctccttgaggtcttcgttggaaacgggatttcttcatattatgctagacagaagaattctcagtaacttccttgtgttgtgtgtattcaactcagagagttgaacgatcctttacacagagcagagttgaaacactgtttttgtggaatttgcaagtggagatttcagccgctttgaggtcaatggtagaataggaaatttcttcctatagaaactagagagaatcattctcagaaactgctctgcgatgtgtgcgttcaactctcagagtttaacttttcttttcattcagcagtttggaaacactctgtttgtaaagtctgcaggtggatattttgaccactcagaggccttcgttggaaacgggtttttttcctgtaaggctagacagaagaattcccagtaacttccttgtgttgtgtacattcaactcacagagttgaacgttcccttagacagagcagatttgaaacactctttttgtgcaattggcaaatggagatttcaagcgctttaaggtcaatggcagaaaaggaaatatcttcgtttcaaaactagacagaatcattcccacaaactgcgttgtgatgtgttcgttcaactcacagagtttaacctttcttttcatagagcagttaggaaacagtctgtttgtcaattctgtaagtggatattctgacatcttgtggccttcgttggaaacggcatttcttcatattctgctagacagaagaattctcagtaacttccttgtgttgtgtgtattcaactcacaaagttgaacgatcctttacacagagcagacttgaaacactctttttgtggaatttgcaagtggagatttcagccgctttgagttcaatggtagaataggaaatatcttcctatagaaactagacagaatgattctcggaatctcctttgtaatgtgtgcgttcaactcacagagtttaacctttcttttcatagagcagttaggaaacactctgtttgtaaagtctgcaagtggatattcagacctcttttaggccttcgttggaaacgggatttcttcatattctgctagacagaagagttctcagtaacttctttgcgttgtgtgtattcaactgacagagttgaactttcatttagagagagcagatttgaaccactgtttttgtggaatttgcaagtggagatttcaagcgctttggggccaaaggcagaaaaggaaataaattcgtataaaaactagacataatcattctcagaaactgctctgcgatgtgtgcgttcaactctcagagtttaacttttcttttcattcagcagtttggaaacactctgtttgtaaagtctgcacgtggatattttgaccacttagaggccttcgttggaaatgggtttttttcctgtaaggctagacagaagaattcccagtaacttccttgtgttgtgtacattcaactcacagagttgaacattcccttagacagagcagatttgaaacactctttttgtgcaattggcaagtggagatttcaagagttttaaggtcaatggcagaaaaggaaatatcttggtttcaaaactagacagaatgattctcagaaactcctttgtgatgtgtgcgttcaactcacagagtttaacctttgtgttcatagagcagttaggaaacactctgtttgtaaagtctgcaagtggatattcagacctccttgaggccttctttggaaacgggatttcttcatattctgctagacagaagaattctcagtaacttccttgtgttgtgtgtattcaactcacagagttgaacgatcctttacagagagcagactttaaacactctttttgtggaatttgcaagtggagatttcagccgctttgaggtcaatggtacaaaaggaaatatcttcgtataaagactagacagaatgattctcagaaactcctttgtgatgtgtgcgttcaactcacagagtttaacttttcttttcatagagcagttaggaaacactctgtttgtaaagtctgcaggtggatattcagacctctttgaggccttcgttggaaacgggatttcttcatattatgctagacagaggaattctcagtaacttccttgtgttgtgtgtattcaactgacagagttgaactttcatttagagagagcagatttgaaacactgtttttgtggaatttgcaagtggagatttcaagcgctttggggacaaaggcagaaaaggaaatatctccgtataaaaactagacagaatgattctcagaaactcctttgtgatgtgtgtgttgaactcacagagtttaacctttcttttcatagagcagttaggaaacactctgtttgtaaagtctgcaagtggatattcagacctctttgaggccttcgttggaaacgggtttttttcatataagcctagacagaagaattcccagtaacttccttgtgttgtgtgtgttcaactcacagagttgaactttcatttacacagagcagatttgaaacactctttttgtgcaattggcaagtggagatttcaagcactttaaggtcaatggcagaaaaggaaatatcttcgtttcaaaactagacagaatcattcccacaaactgcgttgtgatgtgtccgttcatctcacagagtttaacctttcttttcatagagcagttaggaaacagtctgtttgtaaattctgtaagtggatattctgacatcttgtggccttcgttggaaacgggatttcttcatattctgctagacagaataattctcagtaacttccttgtgttgtgtgtattcaactcacagagttgaacgatcctttacagagagcagacttgaaacactctttttgtggaatttgcaagtggagatttcagccgctttgaggtcaacggtagaataggaaatatcttcctatagaaactagacagaatgattctcagaaaatcctttgtgatgtgtgcgttcaactcacagagtttaacttttcttttcatagagcagttaggaaacactctgtttgtaaagtctgcaagtggatattcagacctctttgaggccttcgttggaaacgggatttcttcatattatgcgagacagaagaattccctgtaacttccttgtgttgtgtgtgttcaactcacagagttgaactttcatttacacagagcagatttgaaacactctttttgtggaatttgcaaatggagatttcagccgcgttgaggtcaatggtagaaaaggaaatatcttcgtttcaaaactagacagaatcattctcagaaactgctctgcgatgtgtgcgttcaactctcagagtttaacttttcttttcattcagcagtgtggaaacactctgtttgtaaagtctgcacgtggatattttgaccacttagaggccttcgttggaaacgggtttttttcctgtaaggctagacagaagaattcccagtaacttccttgtgttgtgtacattcaactcacagagttgaaggttcccttagacagagcagacttgtaacactctttttgtggaatttgcaagtggagatttcagccgctttgaagtcaaaggtagaaaaggaaatatcttcctataaaaactagacagaatgattctcagaaactcctttgtgatgtgtgcgttcaactcacagagtttaacttttcttttcatagagcagttgggaaacactctgtttgtaaagtctgcaagtggatattcagacatccttgaggctttcgttggaaacgggatttcttcatatactgctagaaagaagaattctcagtaacttccttgtgttgtgtgttttcaactcacagagttgaacgatcctttacacagagcagacttgaaacactccttttgtggaatttgcaagtggagatttcagccgctttgaggtcaatggtagaataggaaatatcttcctatagaaactagacagaatgattgtcagaaactcctttgtgatgtgtgcgttcaactcacagaatttaacctttcttttcatagagaagttaggagacactgggttggtaaagtctaaaagtggatattcagacatctttgagggtttcgttggaaaagggatttattcatattctgctagacagaagaattcccagtaacttccttgtgttgtgtgtgttcatctcacagagttgaactttcatttacacagagcagatttgaaacactctttttgtggaatttgcaaatggagatttcaagcgctttgaggccaaaggcagaaaaggaaatatcttcgtataaaaactagacagaatcattctcagaaactgctctgcgatgtgtgcgttcaactctcagagtttaacttttcttttcattcagcagtttggaaacactctggttgtaaagtctgcacgtggataacttgaccacttagaggccttcgttggaaacgggtttttttcctgtaaggctagacagaagaattctcagtaacttccttgtgttgtgtgtattcaactcacagagttgaacgatcctttacacagagcagacttgaaacactctttttgtggaatttgcaagtggagatttcagccgctttgaggtcaatggtagaaaaggaaactatcgtcgtataaagactagacagaatgattctcagaaaatgctttgtgatgtgtgcgttcaactcacagagtttaacttttcttttcatagagcagttaggaaacactctgtttgtaaagtctgcaagtggatattcagacctctttgaggccttctttggaaacgggatttctacatattctgctagacagaagaattctcagtaacttccttgtgttctgtgtattcaactcacagagttgaatgatcctttacagagagcagacttgaaacactctttttgtggaatttgcaagtggagatttcagccgctttgaggtcaatggtagaataggaaatatcttcgaagaaaaactagacagaatgattctcagaaactcctttgtgatgtgtgtgttcaactcacagagtttaacctttgttttcatagagcagttagtaaacactctgtttataaagtctgcaagtggatattcagacccctttgaggccttcgttggaaacgggatttcttcatattatgctagacagaagaattctcagtaacttccttttgttgtgtgtattcaactgacagagttgaactttcatttagagagagcagatttgaaacactgtttttgtggaatttgcaagtggagatttcaagcgctttggggccaaaggcagaaaaggaaatatcttcgtataaaaactagacagaatcattctcagaaactgctctgtgatgtgtgcgttcaactctcagagtttaacttttcttttcattcagcagtttggaaacactctgtttgtaaagtctgcacgtggatattttgaccacttagaggccttcgttggaaacgggtttttttttcacgtaaggctagacagaagaattcccagtaacttccttgtgttgtgtacattcaactcacagagttgaaagttcccttagacagagcagacttgtaacactctttttgtggaatttgcaagtggagatttcagccgctttgaagtcaaaggtagaaaaggaaatatcttcctataaaaactagacagaatcattcccacaaactgcgttgcgatgtgttcgttcaactcacagagtttaacatttcttttcatagagcacttaggaaacagtctgtttgtaaattctgtaagtggatattctgacatcttgtggccttcgttggaaacgggatttcttcatattctgctagacagaagaattctcggaaacttccttgtgttgtgtgtattcaactcacagagttgaacgatcctttacacagagcagactggaaacactctttttgtgaaatttgcaagtggagatttcagccgctttaaggtcaatggtaaaataggaaatatcttcctatagaaactagacagaatgattctcagaaacccctttgtgatgtgtacgttcaactcacagagtttaacctttcttttcatagagcagttaggaaacactctgtttgtaaagtctgcaagtggatattcagacctccttgaggccttcgttggaaactgcatttcttcatattatgctagacagaagaattctcagtaacttccttgtgttgtgtgtattcaactgacagagttgaactttcatttagagagagcagatttgaaatactgtttttgtggaatttgcaagtggagatttcaaacgctttggggccaaaggcagaaaaggaaatatcttcgtataaaaactagacagaatcattctcagaaactgctgcgtgatgtgtgcgttcaactctcagagtttaacttttcttttcattcagcggtttggaaacactctgtttgtaaagtctgcacgtggatattttgaccacttagaggccttcgttggaaacgggttttcttcatgtaaggctagacagaagaattcccagtaacttaccttgtgttgtgtacattcaactcacagagttgaacgttcccttagacagagcagatttgaaacactctttttgtgcaattggcaagtggagatttcaagcgctttaaggtcaatggcagaaaaggaaatatcttcgtttcaaaactagacagaatcattcccacaaactgcgttgtaatgtgttcgttcaactcacagagtttaacctttctgttcatagagcagttaggaaacactctgtttgtaaagtctgtaagtggatattctgacatcttgtggccttcgttggaaacgggatttcttcatattctgctagacagaagaattctcagtaacttccttgtgttgtgtgtattcaactcacagagttgaacgatcctttacacagagcagacttgaaacactctttttgtggaatttgcaagtggagatttcagccgctttgaggtcaatggtataataggaaatatcttcctatagaaactagacagaatgattgtcagaaactccttggtgctgtgtgcgttcaactcacagagtttaaactttcttttcatagagcagttaggaaacactctgtttgtaaagtctgcaggtggattttcagacatcattgaggctttcgttggaaacgggatttcttcatattctgctagacagaagaattcccagtaacttccttgtgttgtgtgtgttcaactcacagagttgaactttcatttacacagagcagatttgaaacactctttttgtggaatttgcaaatggagatttcaagggctttgaggccaaaggcagaaaaggaaatgtcttcgtttcaaaactagacagaatcattctcagaaactgcttctggcgatgtgtgcgttcaactctcagagtttaacttttcttttcattcagcagtttggaaacactctgtttgtaaagtctgcacgtggatattttgacgacttagaggccttcgttggaaacgggtttttttcctgtaaggctagacagaagaattcccagtaacttccttgtgttgtgtacattcaactcacagagttgaacgttcccttagacagagcagatttgaaacactctttttgtgcaattggcaaatggagatttcaagcgctttaagttcaatggcagaaaaggaaatatcttcgtttcaaaactggacagaatcattcccacaaactgcgttgtgatgtgttcgttcaactcacagagtttaacctttcttttcatagagcagttaggaaacagtctgtttgaaaattctgtaagtggatattctgacatcttgtggccttcgttggaaacgggatttcttcatattctgctagacagaagaattctcagtaacttccttgtgttgtgtgtattcaactcacagagttgaacgatcctttacacagagcagacttgaaacactctttttgcggaatttgtaagtggagatttcagccgctttgaggtcaatggtagaaaaggaattatcttcgtataaaaactagacagaatcattctcagaaactcctttgtgatgtgtgcgttcaactcacagagtttaacctttcttttcatagagcagttaggaaacactctgtttgtaaagtctgcaagtggatattcagacctccttgaggccttcgttggaaacgggatttcttcatattatgctagacagaataattctcagtaacttccttgtgttgtgtgtattcaactcacagagttgaaggatcctttacagagagcaggcttgaaacactctttttgtggaatttgcaagtggagatttcagccgctttgaggtcaatggtagaataggaaatatcttcttatacaaactagacagaatcattctcagaaactgctgtgtgatgtgtgcgttcaactctcagagtttaacttttcttttcattcagcggtttggaaacactctgtttgtaaagtctgcacgtggatattttgaccacttagaggccttcgttggaaacgggtttttttcatgtaaggctagacagaagaattcccagtaacttccttgtgttgtgtacattcaactcacagtgttgaacgttcccttagacagagcagatttgaaacactctttttgtgcaactggcaagtggagatttcaagcgctttaaggtccatggcagaaaaggaaatatcttcgtttcaaaactagacagaatcattcccacaaactgcgttgtgatgtgttcgttcaactcacagagtttaacctttcttttcatagagcagttaggaaacactctgttggtaaattctgtaagtggatattctgacatcttgtggccttcgttggaaacgggatttctacatattctgccagacagaataattctcattaacttccttgtgttgtgtgtattccactcacagagttgaacgatcctttacagagagcagacttgaaacactctttttgtggaatttgcaagtggagatttcagccgctttgaggtcaatggtagaataggaaatatcttcctatggaaactagacagaatgattctcagaaactcctttgtgatgtgtgtgttcaactcacagagtttaacctttcttttcatagagcagttagtaaaaagtctgtttataaagtctgcaggtggatattcagacccctttgaggccttcgttggaaacgggatttcttcatattatgctagacagaagaattcccagtaacttccttgtgttgtgtgtgttcaactcacagagttgaactttgatttacacagagcagatttgaaacactctttttgtggaatttgcaagtggagatttcaagcgctttgaggccaaaggcagaaaaggaaatatcttcgtttcaaaactagacagaatcattctcagaaactgctgcgtgatgtgtgcgttcaactctcagagtttaacttttcttttcattcagcggtttggaaacactctgtgtgtaaagtctgcacgtggatattttgaccacttagagaccttcgttggaaacgggattttttcatgtaaggctagacagaagaattcccagtaacttccttgtgttgtgtgcattcaactcacagagttgaacgttcccttagacagagcagatttgaaacactctatttgagcaatttgcaagtgtagatttcaagcgctttaaggtcaatggcagaaaaggtaatatcttcgtttcaaaactagacagaatcattcccacaaactgcgttgtgatgtgttcgttcaactcacagagtttaacctttctgttcatagagcagttaggaaacactctgtttgtaaagtctgtaagtggatattctgacatcatgtggccttcgttggaaacgggatttcttcatattctgctagacagaagaattctcagaaacttccttgtgttgtgtgttttcaactcacagagttgaacgatcctttacacagagcagactggaaacactccttttgtggaatttgcaagtggagatttcagccgctttgaggtcaatggtagaataggaaatatcttcctatagaaagtagacagaatgattctcagaaactcctttgtgatgtgtacgttcaactcacagagtttaacctttcttttcatagagcagttgggaaacactctgtttgtaaagtctgcaagtggatattccgacatccttgaggctttcgttggaaacgggatttcttcatattctgctagaaagaagaattctcagtaacttccttgtgttgtgtgtattcaactcacagagttgaacgatcctttacacagagcagacttgaaacactctttttgtggaatttgcaagtggagatttcagccgctttgaggtcaatggtagaataggaaatatcttcctatagaaactagacataatcattctcagaaactgctgcgtgatgtgtgccttcaactctcagagtttaacttttcttttcattcagcggtttggaaacactctgtttgtaaagtctgcacgtggatattttgaccacttagaggccttcgttggaaacgggtttttttcatgtaaggctagacagaagaattcccagtaacttccttgtgttgtgtgcattcaactcacagagttgaacgttcccttagacagagcagatttgaaacactctatttgtgcaatttgcaagtgtagatttcaagcgctttaaggtcaatggcagaaaaggaaatatcttcgtttcaaaactagacagaatgattctcagaaactcctttgtgatgtgtgcgttcaactcacagagtttaacgtttcttttcatagagcagttaggaaacactctgtttgtaaagtctgcaagtggatattcagacatctttgaggctttcgttggaaacgggatttcttcatattctgctagaaagaagaattctcagtaacttccttgtgttgtgtgtattcaactcacagagttgaatgatcctttacacagaacagtcttgaaacactctttttgtggaatttgcaagtggagatttcagccgctttgaggtcaatggtagaataggaaatatcttcctatagaaactagacagaatgattctcagaaactcctttgtgatgtgtgcgttcaactcacagagttcaacctttcttttcatagagcagttggaaaacactctgtttgtaaagtctgcaagtggatattcaaacttctttgaggccttcgttggaagcgggatttcttcatattctgctagacagaaggattcctagtaacttccttgtgttgtgtgtgttcaactcacagagttgaactttcatttacaaagagcagatttgaaacactctttttgtggaatttgcaagtggagatttcaagcgctttgaggccaaaggcagaaaaggaaatatcttcgtataaaaactagacagaatcattctcagaaactgctgcgtgatgtgtgcgttcaactctcagagtttaacttttcttttcattcagcggtttggaaacactctgtttgtaaagtctgcacgtggatgttttgaccacttagaggccttcgttagaaactggtttttttcatgtaaggctagacagaagaattcacagtaacttccttgtgttgtgtgcattcaactcacatagttgaacgttcccttagacagagcagatttgaaacactctatttgtgcaattcgcaagtgtagatttcaagcgctttaaggtcaatggcagaaaaggaaatatcttcgtttcaaaactagacagaatcattctcacaaactgcgttgtgatgtgttcgttcaactcacagagattaacctttctgttcatagagcagtgaggaaacactctgtttgtaaagtctgtaagtggatattctgacatcttgtggccttcgttggaaacgggatttcttcatattctgctagacagaagaattctcagtaacttccttgtgttgtgtgtattcaactcacagagttgaacgatcctttacacagagcagacttgaaacactctttttgcggaatttgcaagtggagatttcagccgctttgaggtcaatggtagaataggaaatatcgtcctatagaaactagacagaaatgattctcagaaactcctttgtgatgtgtgtgttcaactcacagagtttaacatttcttttcatagagcagttaggaaacactctgtttgtaaagtctgcaagtggatattcagacctctttgaggccttcgttggaaacgggtttttttcatataaggctagacagaagaattcccagtaacttccttgtgttgtgtgtgttcaactcacagagttgaactttcatttacacagagcagatttgaaacactctttttgtggaatttacaaatggagatttcaagcgctttgaggccaaaggcagaaaaggaaatatctacgtataaaaactagacagaatcattctcagaaactgctgcgtgatgtgtgcgttcaactctcagagtttaacttttctttacattcagcggtttggaaacactctgtttgtaaagtctgcacgtggatattttgaccacttagaggccttcgatggaaacgggattttttcatgtaaggctagacagaagaattcccagtaacttccttgtgttgtgtgcattcaactcacagagttgaacgttcccttagacagagcagatttgaaacactctatttgtgcaatttgcaagtgtagatttcaagcgctttaaggtcaacggcagaaaaggaaatatcttcgtttcaaaactagacagaatcattcccacaaactgcgttgtgatgtgttcgttcaactcacagagtttaacctttcttttcatagagcagttaggaaacagtctgtttgaaaattctgtaagtggatattctgacatcttgtggccttcgttggaaacgggatttcttcatattctgctagacagaagaattctcagtaacttccttgtgttgtgtgtattcaactcacagagttgaacgatcctttacagagagcagacttgaaacactctttttgtggaatttgcaagtggagatttcagccgctttgaggtcaatggcagaaaaggaaatatcttcgtataaagactagacagaatgattctcagaaactcctttgtgatgtgtgcgttcaacacacagagtttaacttttcttttcatagagcagttaggaaacactctgtttgtaaagtctgcaagtggatattcagacctctttgaggccttcgttggaaacgggatttcttcatattatgctagacagaataattctccgtaacttccttgtgttgtgtgtattcaactcacagagttgaacgatcctttacagagagcagacttgaaacactctttttgtggaatttgcaagtggagatttcagccgctttgaggtcaatggtagaatgggaaatatcttcctatagaaactagacagaatctttctcagaaactgctctgcgatgtgtgcgttcacctctcagagtttaacttttcttttcattcagcagtttggaaacactctgtttgtaaagtctgcacgtggatattttgaccacttagagtccttcgttggaaacgggtttttttcatgtaaggctagacagaagaattcccagtaacttccttgtgttgtgtgcattcaactcacagagatgaacgttcccttagacagagcagatgtgaaacactctatttgtgcaatttgcaagtgtagatttcaagcactttaaggtcaatggcataaaaggaaatatcttcgtttcaaaactagacagaatcattcccacaaactgcgttgtgatgtgttcgttcaactcacagagtttaacctttcttttcatagagcagttaggaaacagtctgtttgtcaattctgtaagtggatattctgacatcttgtggccttctttggaaacgggatttcttcatattctcctagacagaagaattctcagaatcttccttgtgttgtgtgtattcaactcacacagttgaacgatggtttacacagagcagatttgacacactctttttgtggaatttgcaattggaaatttcagccgctttgaggtcaatggtagaaaaggaaatatcttcgtataaaaactagacagaatgattctcagaaactcctttgtgatgtgtgcgttcaactcaaagagtttaacttttcttttcatagagcagttaggaaacactctgtttgtaaagtctgcaagtggatattcagacctctttgaggccttcgttggaaacgggatttcttcatattatgctagacagaagaattctcagtaacttccttgtgttgtgtgtagtcaactcacagagttgaacgatcctttacacagagcagacttgaaacattctttttgtggaatttgcaagtggagatttcagccgctttgaggtcaatagtagaaaaggaaatatcttcgtagaaaaactagacagaatcattctcagaaactgctctgcgatgtgtgcattcaactctcagagtttaatttttcttttcattcagcagtttggaaacattctctttgtaaagtctgcacgtggatattttgaccacttagaggccttcgttggaaacgggttttattcttgtaaggctagacagaagaattcccagtaacttccttgtgttgtgtacattcaactcacagagttgaacgttcccttagacagagcagatttgaaacactctttttgtgcaattggcaagtggagatttcaagcgctttgaggtcaatggcagaaaaggaaatatcttcctttcaaaactagacagaatcattcccacaaactgcgttgtgatgtgttcgttcaactcacagagtttaacctttctgttcatagagcagttaggaaacactctgtttgtaaagtctgtaagtggatattctgatatcttgtggccttcgttggaaacgggatttcttcatattctgctagacagaagaattctcagaatcttccttgtgttgtgtgtattcaactcacagaggtgaacgatcctttacacagagcagacttgaaacactctttttgtggaatttgcaagtggagatttcagccgctttgaggtccatggtagaaaaggaaatatcttcgtataaaaactagacagaatgattctcagaaacttcattgtgacgtgtgcgttcaactcacagagtttaacctttcttttcatagagcagttaggaaacactctgtttgtaaagtctgcaagtggatattcggacctctttgaggccttcgttggaaacgggatttcttcatactgtgctagacagaagaattctcagtaacttccttttgttgtgtgtattcaactgacagagttgaactttcatttagagagagcagatttgaaacactgtttttgtgcaatttgcaagtggagatttcaagcgctttggggccaaaggcagaaaaggaaatatcttcgtataaaaactagacagaatcattctcagaaactgctgcgtgatgtgtgcgttcaactctcagagtttaacttttcttttcattcagcggtttggaaacactctgtttgtaaagtctgcacgtggatattttgaccacttagaggccttcgttggaaacggttttttttcatgtaaggctagacagaagaattcccagtaacttccttgtgttgtgtgcattcaactcacagagttgaacgttcccttagacagagcagatttgaaacactctatttgtgcaatttgcaagtgtagatttgaagcgctttaaggtcaatggcagaaaaggaaatatcttcgtttcaaaactagacagaatcattcccacaaactgcattgtgatgtgttcgttcaactcacagagtttaacctttctgttcatagagcagttaggaaacactctgtttgtaaagtctgcaagtggatattcagacctccttgaggccttcgttggaaacgggatttcttcatattctgctagacagaagaattctcagtaacttccttgtgttgtgtgtattcaactcacagagttgaacgatcctttacacagagcagacttgaaacactctatttgtagaatttgcaagtggagatttcagccgctttgaggtcaatagtagaaaaggaaatatcttcgtagaaaaactagacagaatgattctcagaaactcctttgtgatgtgtgtgttcaactcacagagtttaacctttcttttcctagagcagttagtaaacactctgtttataaagtctgcaagtggatattcagacccctttgaggccttcgttggaaacgggatttcttcatattatgctagacagaagaattctcagtaacttccttgtgttgtgtgtattcaactgacagagttgtactttcatttagagagagcagatttgaaacactgtttttgtggaatttgcaagtggagatttcaagcgctttggggccaaaggcagaaaaggaaatatcttcgtataaaaactagacagaatgattctgagaaactcctttgtgatgtgtgcgttcaactcaccgagtttaacctttcttttcacagagcagttaggaaacactctgtttgtaaagtctgcaagtggatattcagacctccttgaggccttcgttggaaacgggatttcttcatattatgctagacagaagaattctcagtaacttccttgtgttgtgtgtattcaactcacagagttgaacgatcctttacacagagcagacttgaaacactctttttgtgaaatttgcaagtggagattccagccgctttgtggtcaatggtagaataggaaatatcttcctatagaaactagacagaatgattctgagaaactcctttgtgatgtgtgcgttcaactcacagagtttaacctttcttttcatagagcagttaggaaacactctgtttgtaaagtctgcaagtggatattcagacctccttgaagccttcgttggaaacgggatttcttcatattatgctagacagaagaattctcagtaacttccttgtgttttgtgtattcaactcacagagttgaacgatcctttacacagagcagacttgaaacactctttttgtggaatttgcaagtggagatttcagccgctttgagttcaatggtagaataggaaatatcttcctatagaaactagacagaattattctgagaaactcctttgtgatgtgtgcgttcaactcacagagtttaacctttcttttcatagagcagttaggaaacactctgtttgtaaagtctgcaagtggatattcagacctccttgaggccttcgttggaaacgggatttcttcatattatgctagacagaagaattcccagtaacttccttgtgttgtgtgtgatcaactcacagagttgaactttcatttacacagagcagatttgaaacactctttttgtggaatttgcaggtggagatttcaagcgctttgaggccaaaggcagtaaaggaaatatcttcgtataaaaactagacagaatcattctcagaaactgctctgcgatgtgtgcgttcaactctcagagtttaacttttcttttcattcagcagtttggaaacactctgtttgtaaagtctgcatgtggataacttgaccacttagaggacttcgttggaaacgggtttttttcctgtaaggctagacagaagaattcccagaaacttccttgtgttgtgtacattcaactcacagagttgaacgttcccttagacagagcagatttgaaacactctttttgtgcaattggcaagtggtgatttcagccgctttgaggtcaatggtagaaaagggaatatcttcgtataaaaactagacagaatcattcccacaaactgcgttgtgatgtgttcgttcaactcacagagtttaacctttctgttcatagagcagttaggaaacactctgtttgtaaagtctgtaagtagatattctgacatattgtggccttcgttggaaacgggatttcttcatattatgctagacagaagaattctcagtaacttccttgtgttgtgtgtattcaactcacagagttgaacggtcctttacagagagcagacttgaaacactctttttgtggaatttgcaagtggagatttcagccgctttgaggtcaatggtaaaataggaaatatcttcgtatagaaactagacagaatgattctcagaaactcctttgtgatgtgtgtgttcaactcacagagtttaacctttcttttcatagagcagttaggaaacactctgtttataaagtctgcaagtggatattcagacccctttgtggccttcgttggaaacgggatttcttcatattatgctagacagaagaattctcagtaacttccttgtgttgtgtgtattcaactgacagaattgaactttcatttagagagagcagatttgaaacactgtttttgtggtatttgcaagtggagatttcaagcgctttggggccaaaggcagaaaaggaaatatcttcgtataaaaactagacagaatcattctcagaaactgctgcgtgatgtgtgcgttcaactctcagagtttaacttttcttttcattcagcggtttggaaacactctgtttgtaaagtctgcacgtggaaattttgaccacttagaggccttcgttggaaacgggattttttcatgtaaggctagacagaagaattcccagtaacttccttgtgttgtgtacgttcaactcacagagttgaacgttcccttagacagagcagatttgaaacactctttttgtgcaattggcaagtggagatttcaagcgctttaagttcaatggcagaaaaggaaatatcttcgtttcaaaactagacagaacgattctaagaaactcctttgtgatgtgtgcgtacaactcacagagtttaacctttcttttcatagagcagttaggaaacactctgtttgtaaagtctgcaagtggatattcagacctctttgagtccttcgttggaaacgggatttcttcatattctgctagacagaagaattctcagtaacttccttgtgttgtgtgtattcaactcacagagttgtacgatcctttacacagagcagacttgaaacactctttttgtggaatttgcaagtggagatttcagccgctttgaggtcaatagtagaaaaggaaatatcttcgtagaaaaactagacagaatgattctcataaactcctttgtgatgtgtgagttcaaatcacagagtttaacttttcttttcatagatcagttaggaaacactctgtttctaaagtctgcaagtggatattcagatctctttgaggccttcgttggaaacgggatttcttcatattatgctagacagaagaattcccagtaacttccttgtgttgtgtgtgttcaactcacagagttgaactttcatttacacagagcagatttgaaacactctttttgtggaatttgcaaacggagatttcaagcgctttgaggccaaaggcagaaaaggaaatatcttcgtttcaaaactagacagaatcattctcagaaactgctctgcgatgtgtgcgttcaactctcagagtttaacttttcttttcattcagcagtttggaaacactctgtttgtaaagtctgcacgtggatattttgaccacttagaggccttctttggaaacgggttttttcctgtaaggctagacagaagaattcccagtaacttccttgtgttgtgtacattcaactcacagagttgaacgttcccttagacagagcagatttgaaacactctttttgtgcaattggcaagtgcaaatttcaagcgctttaaggtcaatggcagaaaaggaaatatcttcgtttcaaaactacacagaatcattcccacaaactgcgttgtgatgtgttcgttcaactcacagagtttaacctttccgttcatagagcagttaggaaacactctgtttgtaaagtctgtaagaggatattctgacatcttgtggccttcgttggaaacgggatttcttcatattctgctagacagaagaattctcagtaacttccttgtgttgtgtgtattcaactcacagagttgaacgatcctttacacagagcagacttgaaacactctttttgcggaatttgcaagtggagatttcagccgctttgaggtcaatggtagaataggaaatatcttcctgtagaaactagacagaacgattctcagaaactcctttgtgatgtgtgcgttcaactcacagagtttaacttttcttttcatagagccgttaggaaacactctgtttgtaaagtctgcaagtggatattcagacctctttgaggccttcgttagaaacgggatttcttcctattctgctagacagaagaattctcagtaactgccttgtgttgtgtgtatacaactcacagagttgaacgatcctttacacacagcagacttgaaacactctttttgtggaatttgcaagtggagatttcagccgctttgaggtcaatggtagaataggaaatatcttcctatagaaactagacagaatcattctcagaaactgctctgcgatgtgtgcgttgaactctcagagtttaacttttcttttcattcagcaatttggaaacactctgtttgtaaagtctgcacgtggatattttgaccacttagaggccttcgttggaaacgggtttttttcctgtaaggctagacagaagaattcccagtaacttccttgtgttgtgtacattcaactcacagagttgaacgttcccttagacagagcagatttgaaacactctttttgtgcaattggcaaatggagatttcaagcgctttaagttcaatggcagaaaaggaaatatcttcgtttcaaaactagacagaatcattctcagaaactgctctgcgatgtgtgcgttcaactctcagagtttaacttttcttttcattcagcagtttggaaacactctgtttgtaaagtctgcacgtggataatttgaccacttagaggctttcgttggaaacgggtttttttcatgtaaggctagacagaagagttctcagtaacttccttgtgttgtgtgtattcaactcacagagttgaacgatcctttacacagagcagacttggaacactctttttgtggaatttgcaagtggagatttcagccgcgttgaggtcaatggtagaaaaggaaatatcttcgtataaaaactagacagaatgattctcagaaactcctttgtgatgtgtgtgttcaactcacagagtttaacctttcttttcatagagcagttaggaaacactctgtttataaagtctgcaagtggatattcagacctccttgaggccttcgttggaaacgggatttcttcatattctgctagacagaagaattcccagtaactcccttgtgttgtgtgtgttcaactcacagagttgaactttcatttacacagagcagatttgaaacactctttttgtggaatttgcaagtggagatttcaagcgctttgaggccaaaggcagaaaaggaaatatcttcgtataaaaactacacagaattattctcagaaactgctgcgtgatgtgtgcgttcaactctcagagtttaacttttcttttcattcagcggtttggaaacactctgtttgtaaagtctgcacgtggatattttgaccacttagaggccttcgttggaaacgggttttttttcatgtaaggctagacagaagaattcccagtaacttccttgtgttgtgtacattcaactcacagagttgaacgttcccttagacagagcagatttgaaacactctttttgtgcaattggcaaatggagatttcaagcgctttaaggtcaatggcagaaaaggaaatatcttcgtttcaaaactagacagaatcattcccacaaactgcgttgtgatgtgttcgttcaactcacagagtttaacctttctgttcatagagcagttaggaaacactctgtttgtaaagtctgtaagtggatattctgacatcttgtggccttcgttggaaacgggatttcttcatattctgctggacagaagaattcccagtaacttccttgtgttgtgagtgttcaactcacagagttgaaatttcatttacacagagcagatttgaaacactctttttgtggaatttgcaagtggagatttcagccgctttgaggtccttggtagaaaaggaaatatcttcgtataaaaactagacagaatgattctcagaaactcctttgtgatgtgtgtgttcaactcacagagtttaacctttcttttcatagagaagttagtaaacactctgtttataaagtctgcaagtggatattcagacccctttggggccttcgttggaaacgggatttcttcatattatgctagacagaagaattctcagaatcttccttgtgttgtgtgtattcaactcacacagttgaacgattgtttacacagagcagatttgaaacactctttttgtggaatttgcaagtggagatttcaagcgctttgaggccaaaggcagaaaaggaaatatcttcgtataaaaactagacagaatcattctcagaaactgctctgcgatgtgtgcattcaactctcagagtttaacttttcttttcattcagcagtttggaaacactctgtttgtaaagtctgcacgtggatattttgaccatttagaggccttcgttggaaacgggtttttttcttgtaaggctagacagaagaattcccagtaacttccttgtgttgtgtgcattcaactcacagagttgaacgttcccttagacagagcagatttgaaacactctatttgtgcaatttgcaagtgtggatttcaagcgctttaaggtcaacggcagaaaaggaaatatcttcgtttcaaaactagacagaatcattcccacaaactgcgttgtgatgtgttcgttcaactcacagagtttaacctttctgttcatagagcagttaggaaacactctgtttgtaaagtctgtaagtggatattctgacatcttgtggccttcgttggaaacgggatttcttcctattctgctagacagaagaattctcagaaacttcccttgtgttgtgtgttttcaactcacagagttgaacgatcctttacacagagcagacttgaaacactccttttgtggaatttgcaagtggagatttcagccgctttgaggtcaatggtagaataggaaatatcttcctatagaaactagacagaatgattctcagaaacttctttgtgatgtgtgcgttcaactcacagactttaacttttcttttcatagagcagttagtaaacactctgtttgtaaagtctgcaagtggatattcagacctctttgaggccttcgttggaaacgggatttcttcatattctgctagacagaagaattctcagtaacttccttgtgttgtgtgtattcaactgacagagttgaactttcatttagagagagcagatttgaaacactgtttttgtggaatttgcaagtggagatttcaagcgctttggggccaaaggcagaaaaggaaatatcttcgtataaaagctagacagaatcattctcagaaactgctgcgtgatgtgtgcgttcaactcacagagtttaagttttcttttcattcagcggtttggaaacactctgtttgtaaagtctgcacgtggatattttgaccacttagaggccttcgttggaaacgggtttttatcatgtaaggctagacagaagaattcccagtaactttccttgtgttgtgtgcaatcaaatcacagagttgaacgttcccttagacagagtagatttgaaacactctatttgtgcaatttgcaagtgtagatttcaagcgctttaaggtcaaaggcagaaaaggaaatatcttcgtttcaaaactagacagaatcattcccacaaactgcgttgtgatgtgttcgttcaactcacagagtttaacctttctgttcatagagcagttaggaatcactctgtttgtaaagtctgtaagtggatattctgacatcttgtggccttcgtttgaaaagggatttcttcatattctgctagacagaagaattcccagaaacttcgttgtgttgtgtgttttcaactcacagagttcaacgatcctttacacagagtagacttgaaacactctttttgtggaattggcagggtggagatttcagccgctttgaggtcaatggtagaaaaggaaatatcttcgtataaaaactagacagagtgattctcagaaactcctttgtgatgtgtgcgttcaactcacagagttaaacctttcttttcatagagcagttaggaaacactctgtttgtaaagtctgcaagtgggtattcagacatccttgaggctttcgttggaaacgggatttcttcatattctgctagaaagaaggattcccagtaacttccttgtgttgtgtgtgttcaactcacagagttgaactttcatttacaaagagcagatttgaaacactctttttgtggaatttgcaattggagatttcaagcgctttgagaccaaaggcagaaaaggaaatatcttcgtataaaaactagacagaatcattctcagaaactgctctgcgatgtgtgcgttcaactctcagagtttaacttttcttttcattcagcagtttggaaacactctgtttgtaaagtctgcacgtggatattttgaccacttacaggccttcgttggaaacgggtttttttcatgtaaggctagacagaagaattcccagtaacttccttgcgttgtgtgcattcaactcacagagttgaacgttcccttagacagagcagatttgaaacactgtttttgtgcaatttgcaagtggagatttcaagtgctttaaggtcaatggcagaaaaggaaatatcttcgtttcaaaactagacagaatcattcccacaaactgcgttgtgatgtgttcgttcaactcacagatttaaacttttcttttcatagagcagttaggaaacactctgtttgtaaagtctgtaagtggatattctgacatcttgtggccttattggaaacgggatttcttcatattctgctagacagaagaattctcagtaacttccttgtgttgtgaggattcaactcacagagttgaacgatcctttacacagagcagacttgaaacactctttttgtggaatttgcaagtggagatttcagccgctttgaggtcaatggtagaaaaggaaactatcttcatataaagactagacagaatgattctcagaaactcctttgtgatgtgtgtgttcaactcacagagtttaacctttcttttcatagagcagttagtaaacactctgtttataaagtctgcaagtggatattcagaccccttggaggccttcgttggaaacgggatttcttcatattatgctagacagaagaattctcagtaacttccttgtgttgtgtgtattcaactgacagagttgaactttcatttagagagagcagatttgaaacactgtttttgtggaatttgcaattggagatttcaagcgctttggggccaaaggcagaaaaggaaatatcttcgtataaaaactagacagaatcattctcagaaactgctctgcgatgtgtgcgttcaactctcagagtttaatttttcttttcattcagcagtttggaaacactctgtttgtaaagtctgcacgtggataatttgaccacttagaggccttcgttggaaacgggtttttttcatgtaaggctagacagaagaattctcagtaacttccttgtgttgtgtgtattcaactcacagagttgaacgatcctttacacagagcagacttgtaacactctttttgtggaatttgcaagtggagatttcagcctctttgaagtcaaaggtagaaaaggaaatatcttcctataaaaactagacagaatgattctcagaaactcctttgtgatgtgtgtgttcaactcacagagtttaaccttttttttcatagagcagttagtaaacactctgtttataaagtctgcaagtggatattcagacccctttgaggccttcgttggaaacgggatttcttcatattatgctagacagaagaattctcagtaacttccttgtgttgtgtttattcaactcacagagttgaatgatcctttacacagagcagacttgaaacactctttttgtggaatttgcaagtggaggtttcagccgctttgaggtcaatggtagaaaagtaaatatcttcgtataaagactagacagaatgattctcagaaactcctttgtgatgtgtgcgttcaactcacagagtttaacctttctgttcatagagctgttaggaaacactctgtttgtaaagtctgcaagtggatattcagacctcctttaggccttcgttggaaacgggatttcttcatattctgctagacagaagaattctcagtaacttccttgtgttgtgtgtattcaactcacagagttgaacgatcctttacacagagcagacttgaaacactctttttgtggaatttgcaagtggagatttcagccgctttgaggtcaatagtagaaaaggaaatatctttgtagaaaaactagacagaatgattctcagaaactcctttgtgatgtgtgcgttcaactcacagagtttaacctttcttttcatagagcagttaggaaacactctgtttgtaaagtctgcaagtggatattcagacctctttgaggccttcgttggaaacgggtttttttcctataaggctagacagaagaattcccagtaacttccttgtgttgtgtgcattcaactcacagagttgaacgttcccttagacagagcagatttgaaacactctatttgtgcaatttgcaagtgtagatctcaagcgctttaaggtcaatgggagaaaaggaaatatcttcgtttcaaaactagacagaatcattcccacaaactgcgttgtgatgtgttcgttcaactcacagagtttaacctttctgttcatagagcagttaggaaacactctgtttgtaaagtctgtaagtggatattctgacatcttgtggccttcgttggaaacggtatttcttcctattctgctagacagaagaattctcagtaacttccttgtgttgtgtgtattcaactcacatagttgaacgatcctttacacagagcagacttgaaacactctttttgtggaatttgcaagtggagatttcagccgctttgaggtcaatagtagaaaaggaaatatcttcgtagaaaaactagacagaatgattctcagaaactcctttctgatgtgtgtgttcaactcacagagtttaacctttcttttcatagagcagttagtaaacactctgtttataaagtctgcaagtggatattcagaccccttggaggccttcgttggaaacgggttttcttcatattatgctagacagaagaattcccagtaacttccatgtgttatgtgtgttcaactcacagagttgaactttcatttacacagagcagatttgaaacactctttttgtggaatttgcaaatggagatttcaagcgctttgaggccagaggcagaaaaggaaatatcttcgtttaaaaactagacagaatgattctcagaaactcctttgtgatgtgtgcgttcaactcacagtagtttaacctttcttttcatagagcagttaggaaacactctggttgtaaagactacaagtggatattcagacctctttgaggccttcgttggaaacgggtttttttcctgtaagtctagacagaagaattcccagtaacttccttgtgttgtgtacattcaactcacagagttgaacgttcccttagacagagcagatttgaaacgctctttttgtgcaattggcaagtggagatttcaagcgctttaaggtcaatggcagaaaaggaaatatcttcgtttcaaaactagacagaatgattctcagaaaatcttttgtgatgtgtgcgttcaactcacagagtttaacttttcttctcatagagcagttaggaaacactctgtaaagtctgcaagtggatattcagacctctttgaggccttcgttggaaacgggatttcttcatattatgctagacagaataattctcagtaacttccttgtgttgtgtgtattcaactcacagagttgaaggatcctttacagagagcaggcttcaaacactctttttgtcgaatttgcaagtggagatttcagccgctttgaggtcaatggtagaataggaaatatcttcttatagaaactagacagaatgattctcagaaactcctttgtgatgtgtgcgttcaaatcacagagtttaacttttcttttcatagagcagttaggaaacactctgtttgtaaagtctgcaagtggatattcagacctctttgaggccttcgttggaaacgggatttcttcatattatgctagacagaagaattctcagtaacttccttgtgttgtgtgtattcaactcacagagttgaatgatcctttacacagtacagtcttgaaacactctttttgtggaatttgaaagtggagatttcagccgctttgaggtcaatggtagaataggaaataccttcctatagaaactagacagaatcattctcagaaactgctctgtgatgtgtgcgttcaactctcagagtttaacttttcttttcattcagcagtttggaaacactctgtttgtaaagtctgcacgtggatattttgaccacttagaggccttcgttggaaacgggttttttttcatgtaaggctagacggtagaattcccagtaacttccttgtgttgtgtacattcaactcacagagttgaacgttcccttagacagagcagatttgaaacactctttttgtgcaattggcaagtggagatttcaagcgctttaaggtcaatggcagaaaaggaaatatcttcgtttcaaaactagacagaatgattctcagaaaatcttttgtgatgtgtgcgttcaactcacagagtttaacttttcttctcatagagcagttaggaaacactctgtttgtaaagtctgcaagtggatattcagacctctttgtggccttcgttggaaacgggatttcttcatattatgctagacagaataattctcagtaacttccttgtgttgtgtgtattcaactcacagagttgaaggatcctttacagagagcaggcttgcaacactctttttgtcgaatttgcaagtggagatttcagccgctttgaggtcaatggtagaataggaaatatcttcttatagaaactagacagaatgattctcagaaagtcctttgtgatgtgtgtgttcaactcacagagtttaacctttctattcatagagtagttaggaaacactctgtttgtaaagtctgcaagtggatattttgacctctttgaggccttctttggaaacgggtttttttcatataaggctagacagaagaattcccagtaacttccttgtgttttgtgtgttcaactcacagagttgaactttcatttacacagagcagatttgaaacactctttttgtggaatttgcaagtggagatttcaagcgctttgaggccaaaggcagaaaaggaaatatcttcgtataaaaactagacagaatcattctcagaaactgctctgcgatgtgtgcgttcaactctcagagtttaacttttcttttcattcagaagtttggaaacactctgtttgtaaagtctgcacgtggataacttgaccacttagaggtcttcgttggaaacgggtttttttcatgtaaggctagacagaagaattctcagaatcttccttgtgttgtgtgtattcaactcacagagttgaacgatggtttacacagagcagatttgaaacactcttttggtggaatttgcatgtggagatttcagccgccttgaggtcaatggtagaaaaggaaatatcttcgtataaaaactagacagaatgattctcagaaacttctttgtgatgtgtgcgttcaactcacagagtttaacctttcttttcatagaacagttaggaaacactctgtttgtaaactctgcaagtggatattcagacctctttgaggccttcgttggaaacgggatttcttcatactatgctatatagaagaattctcagtaacttccttgtgttgtgtgtattcaactcacagagttgaacgatcctttacacagagcagacctgaaacactctttttgtggaatttgcaagtggagatttcagccgctttgaggtcaatggtagaataggaaatatcttcctatagaaactagacagaatgattctcagaaactcctttgtgatgtgtgcgttcaactcacagagtttaacctttcttttcatagagcagttaggaaacactctgtttgtaaagtctgcaagtggatattcagacatctttgaggccttcgttggaaacgggatttcttcatgttctgctagacagaagaattctcagaaactttccttgtgttgtgtgttttcaactcacagagttgaacgatgctttacacagagtagacttgaaacactctttttgtgtaatttgcaagtggagatttcagccgctttgaagtcaatggtagaaaaggaaatatcttcgtataaaaactagacagaatcattctcagaaactgctgcgtgatgtgtgcgttcaactctcagagtttaacttttcttttcattcagcggtttggaaacactctgtttgtaaagtctgcacgtggaaattttgaccacttagaggccttcgttggaaacgggtttttttcatgtaaggctagacagaagaattcccagtaacttccttgtgttgtgtgcattcaactcacagagttgaacgttcccttagacagagaagatttgaaacactctatttgtgcaatttccaagtgtagatttcaagcgctttaaggtcaacggcagaaaaggaaatatcttcgtttcaaaactagacagaatcattcccacaaactgcgttgtgatgtgttagttcaactcacagagtttaacctttcttttcatagagcagttaggaaacagtctgtttgtcaattctgtaagtggatattctgacatcttgtggccttcgttggaaacgggatttcttcatattctgctagacagaagaattctcagaaacttccttgtgttctgtgtattcaactcacagagttgaacgatcctttacacagagcagacttgaaacactctttttgtggaatttgcaagtggagatttcagtcgctttgaggtccatggtagaaaaggaaatatcttcgtataaaaactagacagaatgattctcagaaactgctttgtgatgtgtgcgttcaactcacagagtttaacctttcttttcatagagcagttaggaaacactctgtttgtaaagtctgcaagtggatattcagacatctttgaggctttcgttggaaacgggatttcttcatattctgctagacagaagaattcccagtaacttccttgtgttgtgtgtgttcaactcacagagttgaactttcattaacacagagcagatttgaaacactctttttgtggaatttgcaagtggagatttcaagcgctttgaggccaaaggcagaaaaggaaatgtcttcgtttcaaaactagacagaatcattctcagaaactgctctgcgatgtgtgagttcaactctcagagtttaacttttcttttcattcagcagtttggaaacactctgtttgtaaagtctccacgtggatattttgaccatttagaggctttcgttggaaacgggtttttttcttgtaaggctagacagaagaattcccaggaacttccttgtgttgtgtacattcaactcacagagttgaacgttcccttagacagagcagatttgaaacactctttttgtgcaattggcaagtggtgatttcagccgctttgaggtcaatggtagaaaaggaaatatcttcgtataaaaactagacagaattattctcataaactcctttgtgatgtgtgcgttcaactcacagagtttaacctttcttttcatagagcagttaggaaacactctgtttgtaaagtctgcaagtggatattcagacctctttgaggccttcgttggaaacgggatttcttcatattctgctagacagaagaattctcagaatcttccttgtgttgtgtgtattcaactcacacagttgaacgattgtttatacagagcagatttgaaacactctttttgtggaatttgcaagtggagatttcagccgctttgaggtcaatggtagaaaaggaaatatcttcgtataaaaactagacagaatgattctcagaaacttctttgtgatgtgtgcgttcaactcacagagtttaacctttcttttcatagagcagttaggaaacactctgtttgtaaactctgcaagtggatattcagacctctttgaggccttcgttggaaacgggatttcttcaaactatgctagacagaagaattctcagaatcttccttgtgttgtgtgttttcaactcacagagttgaacgatcctttacacagagcagacttgaaacactccttttgtggaatttgcaagtggagatttcagccgctttgaggtcaatggtagaataggaaatatcttcgtatagaaagtagacagaatcattctcagaaactgctctgcgatgtgtgcgttcaactctcagagtttaacttttcttttcattcagcagtttggaaacactctgtttgtaaagtctgcacgtggatattttgaccacttagaggccttcgttggaaacgggtttttttcctgtaaggctggacagaagaattcccagtaacttccttgtgttgtgtacattcaactcacagagttgaacgttcccttagacagagcagatttgaaacactctttttgtgcaattggcaagtggagatttcaagcgctttaaggtcaatggcagaaaaggaaatatcttcgtttcaaaactagacagaatcattcccacaaactgcgttgtgatgtgttcgttcaactcacagagtttaacctttcttttcatagagcagttaggaaacactctgttggtaaattctgtaagtggatattctgacatcttgtggcctccgttggaaacgggatttcttcatattctgctagacagaagaattctcagaatcttcccttgtgttgtgtgtattcaactcacagagttgaacgatcctttacacagagcagacttgaaacactctttttgtggaatttgcaagtggacatttcagccgctttgaggtccatggtagaaaaggaaatatcttcgtacaaaaactagacagaacgattctcagaaactcctttgtgatgtgtgcgttgaactcacagagtttaacctttcttttcatagagcagttaggaaacactctgtttgtaaagtctgcaagtggatattcagacctctttgaggccttcgttggaaacgggatttcttcatattctgctagacagaagaattctcagtaacttccttgtgttgtgtgtattcaactgacagagttgaactttcatttagagagagcagatttgaaacactgtttttgtggaatttgcaaatggtgacttcaagcgctttggggccaaacgcagaaaaggaaatatcttcgtataaaaactagacagaatcattctcagaaactgctctgtgatgtgtgcgttcaactctaagagtttaacttttcttttcattcagcagtttggaaacactctgtttgtaaagtctgcacgtggatattttgaccacttagaggccttctttggaaacgggttttttttcatgtaaggctagacagaagaattcccagtaacttccttgtgttgtgtacattcaactcacagagttgaacgttcccttagacagagcagatttgaaacactctttttgtgcaattggcaaatggagatttcaagcgctttaaggtcaatggcagaaaaggaaatatcttcgtttcaaaactagacagaatcattcccacaaactgcgttgtgatgtgttcgttcaactcacagagtttaacctttctgttcatagagcagttaggaaacactctgtttgtaaagtctgtaagtggatattctgacatcttgtagccttcgttggaaacgggatttcttcatattctgctagacagaagaattctcagtaacttccttgtgttgtgtgcattcaactcacagagttgaaagatcctttacacagagcaggttagaaacaatatttttgtggattttgcaagtggagatttcagccactttgaggtcaatggtagaaaaggaaatatcttcataaaaaaactacacagaatgattctcagaaactcctttgtgatgtgtgtgttcaactcacagagtttaacgtttcttttcatagagcagttagtaaacactctgtttataaattctgcaagtggatattcagacctctttgaggtcttcgttggaaacgggatttcttcatattatgctagacagaagaattctcagtaacttccttgtgttgtgtgtattcaactgacagagttgaactttcatttagagagagcagatttgaaacactgtttttgtgcaatttgcaagtggagatttcaagcgctttggggccaaaggcagaaaaggaaatatcttcgtataaaaactagacagaatcattctcagaaactgctgcgtgatgtgtgcgttcaactctcagagtttaacttttcttttcattcagcggtttggaaacactctgtttataaagtctgcacgtggatattttgaccacttagaggccttccttggaaacgggtttttttcatgtaaggctagacagaagaattcccagtaacttccttgtgttgtgtgcattcaactcacagagttgaacgttcccttagacagagcagatttgaaacactctatttgtgcaatttgcaagtgtagatttcaagcgctttaaggtcaacggcagaaaaggaaatatcttcgtttcaaaactagacagaatgattctcagaaactcctttgtgatgtgtgcgttcaactcacagagtttaacctttctgttcatagagcagttaggaaacactctgtttgtaaagtctgcaagtggatattcagacctccttgaggccttcgttggaaacgggatttcttcatattgtgctagacagaagaattctcagaatcgtccttgtgttgtgtgtattcaactcacagagttgaacgatggtttacacagagcagatttgaaacactctttttgtggaatttgcaagtggagatttcagccgctttgaggtcaatggtagaaaaggaaatatcttcgtataaaaactagacagagtgattctcagaaactcctttgtgatgtctgcgttcaactcacagagtttaacctttcttttcatagagcagttaggaaacactctgtttgtaaagtctgcaagtggatattcagacctctttgaggccttcgttgaaaacgggatttcttcatattctgctagacagaagaattctcagtaacttccttgtgttgtgtgtattcaactcacagagttgaacgatcctttacacagagcagacttgaaacactctttttgtggaatttgcaagtggagatttcaagcgctttggggccaaaggcagaaaaggacatatcttcgtataaaaactagacagaatcattctcagaaactgctgcgtgatgtgtgcgttcaactctcagagtttaacttttcttttcattcagcggtttggaaacactctgtttgtaaagtctgcacgtggatattttgaccacttagaggtcttcgttggaaacgggtttttttcatgtaaggctagacagaagaattctcagtaacttccttgtgttgtgtgtattcaactcagagagttgaacgatcctttacacagagcagacttgaaacactctttttgtggaatttgcaagtggagatttcagccgctttgaggtcaatggtagaataggaaatattttcctatagaaactagacagaatgattctgagaaactcctttgtgatgtgtgcgttcaactcacagagtttaacctttcttttcatagaacagttaggaaacactctgtttgtaaagtctgcaagtggatattcagacctccttgaggccttcgttggaaacgggatttcttcatattatgctagacagaagaattctcagtaacttccttgtgttgtgtgtattcaactcacagagttgaacgatcctttacacagagtagacttgaaacactctttttgtggaatttgcaagtggagatttcagccgctttgaggtcaatggtagaataggaaatatcttcctatagaaagtagacagaatgattctcagaaactcctttgtgatgtgtgcgttcaactcacagagtttaacctttcttttcatagagcagttaggaaacactctgtttgtaaagtctgcaagtggatattcagacctccttgaggccttcgttggaagcgggatttcttcatgttctgctagacagaagaattctcagtaacttccctgtgttgtgtgtattcaactgacagagtcgaactttcatttagagagagcagatttgtaacactgtttttgtggaatttgcaagtggagatttcaagcgctttggggccaaaggcagaaaaggaaatatcttcgtataaaaactagacagaatcattctcagaaactgctctgcgatgtgtgcgttcaactctcagagtttaacttttcttttcattcagcagtttggaaacactctgtttgtaaagtctgcacgtggatattttgaccacttagaggccttcgttggaaacgggttttttcctgtaaggctagacagaagaattcacagtaacttccttgtgttgtgtacattcaactcacagagttgaacgttcccttagacagagcagatttgaaacactctttttgtggaatttgcaagtggagatgtcaagcgctttgaggccaaaggcagaaaaggaaatatcttcgtttcaaaactagacagaatgattctcagaaactcctttgtgatgtgtgcgttcaactcacagagtttaacctttcttttcatagagcagttaggaaacactctgtttgtaatgtctgcaagtggatattcagacatccttgaggctttcgttggaaacgggatttcttcatattctgcaagaaagaagaattctcagtaacttccttgtgttgtgtgtattcaactcacagagttgaatgatcctttacacagaacagtcttgaaacactctttttgtggaatttgcaagtggagatttcagcctctttgaggtctatggtagaataggaaatatcttcctatagaaactagacagaatgattctcagaaactcctttgtgatgtgtgcgttcaactcacagagtttaacctttcttttcatagagcagttaggaaacactctgtttgtaatgtctgcaagtggatattcagacctctttgaggccttcgttggaaacgggtttttttcatataaggctagacagaagaattcccagtaacttccttgtgttgtgtgtgttcaactcacagagttgaactttcatttacacagcgcagatttgaaacactctttttgtggaatttgcaagtggagatttcaagcgctttgaggccaaaggcagaaaaggaaatatcttcgtttcaaaactagacagaatcattctcagaaactgctctgcgatgtgtgcattcaactctcagagtttaatttttcttttcattcagcagtttggaaacactctctttgtaaagtctgcacgtggatattttgaccacttagaggccttcgttggaaacgggttttattcttgtaaggctagacagaagaattcccagtaacttccttgtgttgtgtacattcaactcacagagttgaacgttcccttagacagagcagatttgaaacactctttttgtgcaattggcaagtggagatttcaagcgctttaaggtcaatggcagaaaaggaaatatcttcgtttcaaaactagacagaatcattcccacaaactgcgttgtgatgtgttcgttcaactcacagagtttaaccttccttttcatagagcagttaggaaacagtctgtttgtaaattctgtaagtggatattctgacatcttgtggccttcgttggaaacgggatttcttcatattctgctagacagaagaattctcagtaactgccttgtgttgtgtgtattcaagtcacagagttgaacgatcctttacacagagcagacttgaaacactctttttgtggaatttgcaagtggagatttcagccgctttgaggtcaatggtagaataggaaatatcttcctatagaaactagacagaatgattctcagaaactcctttgtgatgtgtgcgttcaactcacacagtttaacctttcttttcatagagcagttgggaaacactctgtttgtaaagtctgcaagtggatattcagacctccttgaggccttcgttggaaacgggatttcttcatattatgctaggcagaagaattcccagtaacttccttgtgttgtgtgtgttcaactcacagagttgaacttttatttacacagagcagatttgaaactctctttttgtggaatttgcaattggagatttcaagcgctttgaggccaaaggcagaaaaggaaatatcttcgtataaaaactagacagaatcactctcagaaactgctctgcgatgtgtgcgttcaactctcagagtttaacttttcttttcattcagcagtttggaaacactctgtttgtaaagtctgcacgtggatattttgaccactcagaggccttcgttggaaacggttttttttcctgtaaggctagacagaagaattcccagtaacttccttgtgttgtgtgcattcaactcacagagttgaacgttcccttagacagagcagatttgaaacactctatttgtgcaatttgcaaatgtagatttcaagcgctttaaggtcaatggcagaaaaggaaatatcttcgtttcaaaactagacagaatcattcccacaaactgcgttgtcatgagttcgttcaactcacagagtttaacctttcttttcatagagcagttaggaaacagtctgtttgtaaattctgtaagtggatattctgacatcttgtggccttcgttggaaacgggatttcttcatattctgctagacagaagaattctcagtaacttccttgtgttgtgtgtattcaactcacagagttgaacgatcctttacacagagcagacttgaaacactctttttgtggaatttgcaagtggagatttcagccgctttgaggtcaatggtagaaaaggaaatatcttcgtatgaagactagacagaatgattctcagaaactcctttgtgatgtgtgtgttcaactcacagagtttaacctttcttttcatagagcagttagtaaatactctgtttatacagtctgcaagtggatattcagacccctttgaggccttcgttggaaacgggatttcttcatattatgctagacagaagaattcccagtaacttccttgtgttgtgtgtgttcaactcacagagttgaactttcatttacacagagcagatttgaaacactctttttgtggaatttgcaagtggagatttcaagcgctgtgaggccaaaggcagaaaaggaaatatcttcgtataaaaactagacagaatcattctcagaaactgctgcgtgatgtgtgcgttcaactctcagagtttaacttttcttttcattcagcggtttggaaacactctgtttgtaaagtctgcacgtggatattttgaccacttagaggccttcgttggaaacgggttttttttcatgtaaggctacacagaagaattcccagtaacttccttgtgttgtgtgcattcaactcacagagttgaacgttcccttagacagagcagatttgaaacactctatttgtgcaatttgcaagtgtagatttcaagcgctttaaggtcaatggcagaaaaggaaatatcttcgtttcaaaactagacagaatgattctcataaactcctttgtgatgtgtgcgttcaactcaccgagtttaacctttcttttcatagagcagttaggaaacactctgtttgtaaagtctgcaagtggatattcagacctccttggggccttcgttggaaacgggatttcttcatattctgctagacataagaattctcagtaacttccttgtgctgtgtgtattcaactcacagagttgaacgatcctttacacagagcatacttgtaacactcttcttgtggaatttgcaagtggagatttcagccgctttgaggtcaatggtagaataggaaatatcttcgtataaaaactagacagaatgattctcagaaactcctttgtgatgtgtgcgttcaactcacagagtttaacctttcttttcatagagcagttaggaaacactctgtttgtaaagtctgcaagtggatattcagacctctttgaggccttcgttggaaacgggttttttacatataaggctaaacagaagaattcccagtaacttccttgtgttgtgtgtgttcaactcacagagttgaactttcatttacacagagcagatttgaaacactcattttgtggaatttgcaagtggagatttcaagcgctttgaggccaaaggcagaaaaggaaatatcttcgtttcaaaactagacagaatcattctcagaaactgctctgcgatgtgtgcgttcaactctcagagtttaacttttcttttcattcagcagtttggaaacactctgtttgtaaagtctgcacgtggataatttgaccacttagaggccttcgttggaaacgggtttttttcatgtaaggctagacagaagaattcccagtaacttccttgtgttgtgtgcattcaactcacagagttgaacgttcctttagacagagcagatttgaaacactctatttgtgcaatttgcaagtgtagatttcaagcgctttaaggtcaacggcagaaaaggaaatatcttcgtttcaaaactagacagaatcattcccacaaactgcgttgtgatgtgttcgttcaactcacagagtttaacctttcttttcatacagcagttaggaaacactctgtttgtaaactctgcaagtggatattcagacctctttgaggccttcgatggaaacgggatttctccatactatgctagacagaagaattctcagtaacttccttgtgttgtgtgtattcaactcacagagttgaacgatcctttacacagagcagacttgaaacactctttttgtggaatttgcaagaggagatttcagccgctttgaggtcaatagtagaaaaggaaatatcttcgtagaaaaactagacagaatgattctcagaaactcctttgtgatgtgtgcgttcaactcacagagtttaacctttcttttcatagagctgttaggaaacactctgtttgtaaagtctgcaagtggatattcagaactctttgaggccttcgttggaaacgggatttcttcttattctgctagagagaagaattcccagtaacttccttgtgttgtgtgtgttcaactcacagagttgaactttcatttacacagagcagatttgaaacactctttttgtggaatttgcaagtggagatttcaagcgctttgagaccaaaggcagaaaaggaaatatcttcgtataaaaactagacagaatcattctaagaaactgctctgcgatgtgtgcgttcaactctcagagtttaacttttcttttcattcagcagtttggaaacactctgtttgtaaagtctgcacgtggataacttgaccacttagaggccttcgttggaaacgggtttttttcatgtaaggctagacagaagaattcccagtaacttccttgtgttgtgtgcattcaactcacagagttgaacgttcccttagacagagcagatttgaaacactctatttgtgcaatttacaagtgtagttttcaagctctttaaggtcaacggcagaaaaggaaatatcttcgtttcaaaactagacagaatcattcccacaaactgcgttgtgatgtgttcgttcaactcagagagtttaacctttctgtacatagagcagttaggaaacactctgtttgtaaagtctgtaagtggatattctgacatcttgtggccttcgttggaaacgggatttcttcatattctgctagacagaagaattctcagtaacttccttgtgttgtgtgtattcaactcacagagtcgaacgatcctttacacagagcggacttgaaacactcgttttgtggaatttgcaagtggagatttcagccgatttgaggtcaatggtagaaaaggaaatatcttcgtataaaaactagacagagtgattctcagaaactcctttgtgatgtctgcgttcaactcacagagtttaacctttcttttcatagagcagttaggaaacactctgtttgtaaagtctgcaagtggatattcagacctccttgaggccttcattggaaacgggatttcttcatattctgctatacaaaagaattctcagaaacttccttgtgttgtgtgtattcaactcacagagttgaacgatcgtttacacagagcagacttgagacactctttttgtggaatttgtaagtggagatttcagccgctttgaggtcaatggtagaaaaggaaatatcttcatataaaaagtagacagaatgattctcagaatctcctttgtgatgtgtgcgttcaactcacagagtttaacctttcttttcatagagcagttaggaaacactctgtttgtaaagtctgcaagtggatattcagacctctttgaggccttcgttcgaaacgggttttcttcatattatgctagacagaagaattcccagtaacttccttgtgttgtgtgcattcaactcacagagttgaacgttcccttagacagagcagatttgaaacactctatttgtgcaatttgcaagtgtagatttcaagcgctttaaggtcaacggcagaaaaggaaatatcttcgtttcaaaactagacagaatgattctcagaaacttcattgtgacgtgttcgttcaactcacagagtttaacctttcttttcatagagcagttaggaaacactctgtttgtaaagtctgcaagtggatattcagacctctttgaggccttcgttggaaacgggatttcttcatactgtgctagacagaagaattctcagtaacttccttgtgttgtgtgtattcaactcacagagttgaacgatcctttacacagagcggacatgaaacacactttttgtggaatttgcaagtggagatttcagccgcgttgaggtcaatggtagaaaaggaaatatcttcgtataaaaactagacagaatgattctcagaaactcctttgtgatgtgtgtgtccaactcacagagtttaacctttcttttcatagagcagttaggaaacactctgtttgtaaagtctgcaagaggatattcagacctctttgaggccttcgttggaaacgggtttttttcatataaggctagacagaagaattcccagtaacttccttgtgttgtgtgtgttcaactcacagagttgaactttcatttacacagagcagatttgaaaccctctttttgtggaatttgcaaatggagatttctgccgcgttgaggtcaatggtagaaaaggaaatatcttcgtttcaaaactagacagaatcattctcagaaactgctctgcgatgtgtgcgttcaactcttagagtttaacttttcttttcagtcagcagtttggaaacactctgtttgtaaagtctgcacgtggatattttgaccacttagaggccttcgttggaaacgggtttttttcctgtaacgctagacagaagaattcccagtaacttccttgtgttgtgtgcattcaactcacagagttgaacgttcccttagacagagcagatttgaaacactctatttgtgcaatttgcaagtgtagatttcaagcgctttaaggtcaatggcagaaaaggaaatttcttcgtttcaaaactagacagaatgattctcagaaactcctttgtgatgagtgtgttcaactcacagagtttaacctttcttttcatagagcagttaggaaacactctgtttgtaaactctgcaagtggatattcagacctctttgaggccttcgttggaaacgggatttcttcatactgtgctagacagaagaattctcagtaacttccttgtgttgtgtgtattcaactcacagagttgaacgatcctttacacagagcggacttgaaacactctttttgtggaatttgcaagtggagatttcagccgcgttgaggtcaatggtagaaaaggaaatatcttcgtataaaaactagacagaatgattctcagaaactcctttgtgatgtgtgccgttcaactcacagagtttaacctttctttacatagagcagttaggaaacactctgtttgtaaagtctgcaagtggatattcagacctctttgaggccttcgttggaaacgggtttttttcatataaggctagacagaagaattctcagtaacttccttgtgttgtgtgtattcaactgacagagttgaactttgatttagagagagcagatttgaaacactgtttttgtggaatttgcaggtggagatttcaagcgatttggggccaaatgcagaaaaggaaatatcttcgtataaaaactagacagaatcattctcagaaactgctgcttgatgtgtgcgttcaactcacagagtttaacttttcttttcattcagcggtttggaaacactctgtttgtaaagtctgcacgtggatattttgaccacttagaggccttcgttggaaacgggattttttcatgtaaggctagacagaagaattcccagtaacttccttgtgttgtgtgcattccactcacagagttgaacgttcccttagacagagcagatttgaaacactctatttgtgcaatttgcaaatgtagatttcaagcgctttaaggtcaatggcaggaaaggaaatatcttcgtttcaaaactagacagaatgattctcagaaacttctttgtgatgtgtgcgttcaactcacagagtttaacctttcttttcatagagcagttaggaaacagtctgtttgtcaattctgtaagtggatattctgacatcttgtggccttcgttggaaacgggatttcttcatactatgctagacagaagaattctcagtaacttccttgtgttgtgtgtattcaactcacagagttgcacgatcctttacacagagcagacttgaaacactctttttgtggaatttgcaagtggagatttcagccgctttgaggtcaatggtagaataggaaatatcttcctatagaaactagacagaatgattctcagaaactcctttgcgatgtgtgcgttcaactcacagagtttaacctttcttttcatagagcagttaggaaacactctgtttgtaaagtctgcaaggggatattcagacctctttgaagccttcgttggaaacgggatttcttcatgttatgctagacagaagaattcccagtaacttccttgtgttgtgtgtgttcaactcacagagttgaactttcatttacacagagcagatttgaaacactctttttgtggaatttgcaaatggagatttcaagcgctttgaggccaaaggcagaaaaggaaatgtcttcgtttcaaaactagacagaatcattctcagaaactgctgcgtgatgtgcgcgttcaactctcagaatttaacttttcttttcattcagcggtttggaaacactctgtttgtaaagtctgcacgtggatattttgaccacttagaggccttcgttggaaacgggttttttgcatgtaaggctagacagaagaattctcagtaacttcccttgtgttgtgtgcattcaactcacagagttgaacgttcccttagacagagcagatttgaaacagcctatttttgcaatttgcaagtgtagatttcaagcgctttaaggtcaacggctgaaaaggaaatatcttcctttcaaaactagacagaacgattctcagaaactcctttgtgatgtgtgcgttcaactcatagagtttaacctttcttttcatagagcagttaggaaacactctgtttgtaaagtctgcaagtggatattcagacctctttgaggccttcgttggaaacgggatttcttcatattctgctagacagaagaattctcagtaacttccttgtgttgtgtgtattcaactcacagagttgaacgatcctttacacagagcagacttgaaacactctttttgtggaaattgcaattggaggtttcagccgctttgaggtcaatggtagaaaaggaaatatcttcgtataaaaactagacagaatgattctcagaaactcctttgtgatgtgtgcgttcaactcacagagtttaacctttctgttcatagagcagttaggaaacactctgtttgtaaagtctggaagtggatattcagacctccttgaggccttcgttggaaacggtatttcttcatattctgctagacagaagaattctcagtaacttccttgtgttgtgtgtattcaactgacagagttgaactttcatttagacagagcagatttgaaacactctttttgtggaatttgcaaaggtagatttcatgcgctttgaggccaaaggcagaaaaggaaatatcttcgtataaaaactagacagaatcattctcagaaactgctctgcgatgtgtgcgttcaactctcagagtttaacttttcttttcattcagcagtttggaaacactctgtttgtaaagtctgcaagtggatgttttgaccacttagaggccttcgttggaaacgggtttttttcatgtaaggctagacagaagaattcccagtaacttccttgtgttgtgtgcattcaactcacagatttgaacgttcccttagacagagcagatttgaaacactctttttgtgcaattggcaagtggagatttcaagcgctttaaggtcaatggaagaaaaggaaatatcttcgtttcaaaactagacagaatcattcccacaaactgcgttgtgatgtgttcgttcaactcacagagtttaacctttcttttcatagagcagttaggaaacagtctgtttgtaaattctgtaagtggatattctgacatcttgtggccttcgttggaaacgggatttcttcatattctgctagacagaagaattctcagaaacttccttgtgttgtgtgttttcaactcacagagttgaacgatgctttacacagagtagacttgaaacactctttttgtgtaatttgcaagtggagatttcagccgctttgaggtcaatggtagaaaaggaaatatcttaatatagaaactagatagaatgattctcagaaactcctttgtgatgtgtgcgttcaactcacagagtttgacctttcttttcatagagcagttaggaaacactctgtttgtaaagtctgcaactggatattcagacctctttgaggccttcgttggaaacgggtttttttcatataaggctagacagaagaattcccagtaacttccttgtgttgtgtgtgttcaactcacagagttgaactttcatgtacacagagcagatttgaaacactctttttgtggaatttgcaagtggagatttcaagcgctttgaggccaaaggcagaaaaggaaataactccgtttcaaaactagacagaatcattctcagaaactgctctgcgatgtgtgcgttcaactcttagagtttaacttttcttttcattcagcagtttggaaacactctgtttgtaaagtctgcacgtggataatttgaccacttagaggccttcgttggaaacgggtttttttcatgtaaggctagacagaagaattcccagtaacttccttgtgttgtgtacattcaactcacagagttgaacgttcccttagacagagcagatttgaaacactctttttgtgcaattggcaaatggagatttcaagcgctttaaggtcaatggcagaaaaggaaatatcttcgtttcaaaaccagacagaatgattctcagaaactccttagtgatgtgtgtgtccaactcacagggtttaaactttcttttcatagagcagttagcaaacactctgtttgtaaagtctgcaagaggatattcagacctctttgaggccttcgttggaaacgggtttttttcatataaggctagacagaagaattcccagtaacttccttgtgttgtgtgtgttcaactcacagagttgaactttcatttacacagagcagatttgaaacactctttttgtggaatttgcaaatggagatttcagccgcgttgaggtcaacggtagaaaaggaaatatcttcgtttcaaaactagacagaatcattctcagaaactgctctgcgatgtgtgcgttcaactctcagagtttaacttttcttttcattcagcagtgtggaaacactgtgtttgtaaagtctgcacgtggatattttgaccacttacaggccttcgttggaaacgggtttttttcctgtaaggctagacagaagaattcccagtaacttccttgtgttgtgtgcattcaactcacagagttgaacgttcccttagtcagagcagatttgaaacactctatttgtgcaatttgcaagtgtagatttcaagcgctttaaggtcaatggcagaaaaggaaatatcttcgtttcaaaactagacagaatgattctcagaaactcctttgtgatgtgtgcgttcaactcacagagtttaacctttcttttcatagagcagttaggaaacactctggttgtaaagtctgcaagtggatattcagacctgcttgaggccttcgttggaaacgggatttcttcatattatgctagacagaagaattctcagtaacttccttgtgttgtgtgtactcaactcacagagttcaacgatcctttacacagagcagacttcaaacactctttttgtggaatttgcaagtggagatttcagccgctttgaggtcaatggtagaataggaaatatcttcctatagaaactagacagaatgattctcagaaactcctttgtgacgtgtgtgcccaactcacagagtttaacctttcttttcatagagctgttaggaaacactctgtttgtaaagtctgcaagaggatattcagacctctttgaggccttcgttggaaacgggtttttttcatataaggctagacagaagaattcccagtaacttccttgtgttgtgtgtgttcaactcacagagttgaactttcatttaaacagagcagatttgaaacactctttttgtggaatttgcaaatggagatttcagccgcgttgaggtcaatggtagaaaaggaaatatcttcgtttcaaaactagacagaatcattctcagaaactgctctgcgatgtgtgcgttcaactctcagagtttaacttttcttttcattcagcagtgtggaaacactctgtttgtaaagtctgcacgtggatattttgaccacttagaggccttcgttggaaacgggtttttttcctgtaaggctagacagaagaattcccagtaacttctttgtgttgtgtgcattcaactcacagagttgaacgttcccttagagagagcagatttgaaacactctatttgtgcaatttgcaagtgtagatttcaagcgctttaaggtcaatgacagaaaaggaaatatcttcgtttcaaaactagacagaatcattcccacaaactgcgttgtgatgtgttcgttcaactcacagagtttaacctttcttttcatagagcagttaggaaacactctgttggtaaattctgtaagtggatattctgacatcttgtggccttcgttggaaacaggatttcttcatattctgctacacagaagaattctcagtaacttccttgtgttgtgtgtattcaactcacagagttgaacgatcctttacacagagcggacttgaaacacactttttgtggaatttgcaagtggagatttcagccgctttgaggtccatggtagaaaaggaaatatcttcgtataaaaactagacagagtgattctcagaaactcctttgtgatgtctgcgttcaactcacagagtttaacgtttcttttcatagagcagttaggaaacactctgtttgtaaagtctgcaagtggatattcagacctccttgaggccttcgttggaaacgggatttcttcatattctgctatacagaagaattctcagtaacttccttgtgttgtgtgtattcaactgacagagttgaactttcatttagagagagcagatttgaaacactgttttggtggaatttgcaagtggagatttcaagcgatttggggccaaaggcagaaaaggaaatatcttcgtataaaaactagacagaaatcattctcagaaactgctctgcgatgtgtgcgttcaactctcaggagtttaacttttcttttcattcagcagtttggaaacactctgtttgtaaagtctgcacgtggatattttgaccacttagaggccttcgttggaaacgggtttttttcctgtaaggctagacagaagaattctcagtaactttccttgtgttgtgtgtattcaactgacagagttgaactttcatttagagagagctgatttgaaacactgtttttgtggaatttgcaagtggagatttcaagcgctttggggccaaaggcagaaaaggaaatatcttcgtataaaaactagacagaatcattctcagaaactgctctgcgatgtgtgcgttcaactctcagtgtttaacttttcttttcattcagcagtttggaaacactctgtttgtaaagtctgcacgtggataatttgaccacttagaggtcttcgttggaaacgggtttttttcatgtaaggctagacagaagaattctcagaatcttccttgtgttgtgtgtattcaactcacagagttgaacgatggtgtacacagagcagatttgaaacactctttttgtggaatttgcaagtggagatttcagccgctttgaggtaaatggtagaaaaagaaatatcttcgtataaaaactagacagaatgattctcagaaacttctttgtgatgtgtgcgttcaactcacagagtttaacctttcttttcatagagcagttaggaaacactctgtttgtaaactctgcaagtggatattcagacctctttgaggccttcgttggaaacgggtttttttcatgtaaggctagacagaagaattctcagtaacttccttgtgttgtgtgtattcaacttacagagttgaactttcatttacacagagcagatttgaaacactctttttgtggaatttgcaaatggagatttcaagcgctttgaagccaaaggcagaaaaggaaatatcttcctataaaaactagacagaatgattctcagaaactcctttgtgatgtgtgcgttcaactcacagagtttaacctttcttttcatagagcagttaggaaacactctgcttgtaaagtctgcaagtggatattcagccctctttgaggcctttgttggaaacgggtttttttcatataaggctagacagaagaattcccagtaacttccttgtgttgtgtacattcaactcacagagttgaacgttcccttagacagagcagatttgaaacactctttttgtgcaattggcaagtggagatttcaagcgctttaaggtcaatggcagaaaaggaaatatcttcgtttcaaaactagacagaatgattctcagaaactcctttgtgatgtgtgcgttcaactcacagagtttaacctttcttttcatagagcagttaggaaacactctgtttgtactgtctgcaagtggatattcagacatccttgaggctttcgttggaaacgggatttcttcatattctgctagaaagaagaattctcagtaacttccttgtgttgtgtgtattcaactcacagagttgaacgatcctttacacagagcagacttgaaacactctttttgtggaatttgcaagtggagatttcagccgctgtgaggtcaatggtagaataggaaatatcttcctatagaaactagacagaatgatactcagaaactcctttgtgatgtgtgtgttcaactcacagagtttaacctttcttttcatagagcagttagtaaacactctgtttataaagtctgcaagtggatattcagacccctttgaggccttcgttggaaacgggatttcttcatattatgctagaaagaagaattctcagtaacttccttgtgttgtgtgtattcaactgacagagttgaactttcatttagagagagcagatttgaaacactgtttttgtggaatttgcaagtggagatttcaagagctttgggtccaaaggcagaaaaggaaatatcttcgtacaaaaactagacagaatcattctcagaaactgctgcgtgatgtgtgggttcaactctcagagtttaacttttcttttcattcagcggtttggaaacactctgtttgtaaagtctgcacgtggatattttgaccacttagaggccttcgttggaaaagggtttttttcatgtaaggctagacagaagaattcccagtaacttccttgtgttgtgtgcattcaactcacagagttgaacgttcccttagacagagcagatttgaaacactctatttgtgcaatttgcaagtgtagatttcaagcgctttaaggtcaacggcagagaaggaaatatcttcgtttcaaaactagacagaacgattctcagaaactcctttgtgatgtgtgctttcaactcacagagtttaacctttcttttcatagagcagttaggaaacactctgtttgtaaagtctgcaagtggatattcagacctccttgaggccttcgttggaaacgggatttcttcatattctgctagacagaagaattctcagtaacttccttgtgttgtgtgtattcaactcacagagttgaatgatcctttacacagagcagacttgaaacactctttttgtggaatttgcaagtggagatttcagccgctttgaggtcaatggtagaaaagtaaatatcttcgtataaagactagacagaaatgattctcagaaacttctttgtgatgtgtgcgttcaactcacagaagtttaacctttcttttcatagagcagttgggaaacactctgtttttaaagtctgcaagtggatattcagacctctttgaggccttcgttggaaacgggtttttttcatgtaaggctagacagaagaattctcagtaacttccttgtattgtgtgtattcaactcacagagttgaacgatcctttacacagaacagacttgaaacactctttttgtggaatttgcaagtggagatttcagccgctttgaggtcaatggtagaataggaaatatcttcctatagaaactagacagaatgattctcagaaactcctttgtgatgtgtgcattcaactcacagagtttaacctttcttttcattgagcagttaggaaacactctgtttgtaaagtctgcaagttgatattcagacctctttgaggccttcgttggaaacgggatttcttcatattatgctagacagaagaattcccagtaacttccttgtgttgtgcacattcaactcacagagttgaacgttcccttagacagagcagatttgaaacactctttttgtgcaattggcaagtggtgatttcagcctctttgaggtcaatggtagaaaaggaaatatcttcgtataaaaactagacagaatgattctcagaaacttctttgtgatgtgtgcgttcaactcacagagtttaacctttcttttcatagagcagttaggaaacactctgtttgtaaactctgcaagtggatattcagacctgtttgaggccttctttggaaacgggatttcttcatactatgctagacagaagaattctcagtaacttccttgtgttgtgtgtattcaactcacagagttgaacaatcctttacacagagcagacttgtaacactctttttgtggaatttgcaagtggagatttcagccgctttgaagtcaaaggtagaaaaggaaatatcttcctataaaaactagacagaatgattctcagaaactcctttgagatgtgtgcgctcaactcacagagtttaacctttcttttcatagagcagttaggaaacactctgtttgtaaagtctgaaggtggatattcagacctctttgaggccttcgttggaaatgggttttttcatataaggctagacagaagaattcccagtaacttccttgtgttgtgtgtgttcaactcacagagttgaactttcatgtacacagagcagatttgaaacactctttttgtggaatttgcaaatggagatttcaagcgctttgaggccaaaggcagaaaaagaaatatcttcgtataaaaactagacagaaatcattctcagaaactgctctgcgatgtgtgcgttcaactctcaggagtttaacttttcttttcattcagcagtttggaaacactctgtttgtaaagtctgcacgtggatattttgaccacttagaggccttcgttggaaacgggtttttttcctgtaaggctagacagaagaattcccagtaacttccttgtgttgtgtgcattcaactcacagagttgaacgttcccttagacagagcagatttgaaacactctatttgtgcaatttgcaagtgtagatttcaagcgctttaaggtcaacggcagaaaaggaaatatcttcgtttcaaaactagacagaatgattctcagaaactcctttgtgatgtgtgcgttcaactcacagagttcaacctttcttttcatagagcagttgggaaacactctgtttgtaaagtctgcaagtggatattcagtcttctttgaggccttcgttggaagcgggatttcttcatattctgctagacagaagaattctcagtaactgccttgtgttgtgtgtattcaactcacagagttgaacgatcctttacacagagcagacttgaaacactctttttgtggaatttgcaagtggagatttcagccgctttgaggtcaatggtagaataggaaatatcttcctatagaaactagacagaatgattcttagaaactcctttgtgatgtgtgcgttcaactcacagagtttaacctttctgttcatagagctgttaggaaacactctgtttgtaaagtctgcaagtggatattcagacctcctttaggccttcgttggaaacgggatttcttcatattctgctagacagaagaattcccagtaacttccttgtgttgtgtgtgttcaactcacagagttgaactttgatttacacagagcagatttgaaacactctttttgtggaatttgcaagtggagatttcaagcgctttgaggccaaaggcagaaaagggaatatcttcgtataaaaactagacagaacgattctcagaaacttctttgtgatgtgtgcgttcaactcacagagttaaaactttcttttcatagagcagttaggaaacactctgtttgtaaagactgcacgtggatattcagacctctttgaggccttcgttggaaacgggtttttttcctgtaagcctagacagaagaattcccagtaacttccttgtgttgtgtacattcaactcacagagttgaacgttcccttagacagagcagatttcaaacactctttttgtgcaattggcaagtggagatttcaagcgctttaaggtcaatggcagaaaaggaaatatcttcgtttcaaaactagacagaattattcccacaaactgcgttgtgatgtgttcgttcaactcacagagtttaacctttcttttcatagagcagttaggaaacactctgtttgtaaattctgtaagtggatattctgacatcttgtggccttcgttggaaacgggatttcttcatattctgctagacagaagaattctcagaatcttccttgtgttgtgtgtattcaactcacagagttgaacgatcctttaaacagagcggacttgaaacactctttttgtggaatttgcaagtggagatttcagccgctttgaggtcaatggcagaaaaggaaatatcttcgaataaaaactagacagaatgattctcagaaactcctttgtgatgtgtgcgttcaactcacagagtttaacttttcttttcatagagcagttaggaaacactctgtttgtaaagtctgcaagtggatattcagacctcttgaggccttcgttggaaacgggatttcttcatattatgctagacagaataattctcagtaacttccttgtgttctctgtattcaactcacagagttgaacgatcctttacagagagcagacttgaaacactctttttgtggaatttgcaagtggagatttcagccgctttgaggtcaatggtagaaaaggcaatatcttcgtataaagactagacagaatgattctcataaactcctttgtgatgtgtgcgttcaactcacagagtttaacttttcttttcatagagcagttaggaaacactctgtttgtaaagtctgcaagtggatattcagacctctttgaggccttcgttggaaatgggatttcttcatattatgctagacagaagaattcccagtaacttccttgtgttgtgtgcattcaactcacagagttgaacgttcccttagacagagcagatttgaaacactctatttgtgcaatttgcaagtgtagatttcaagcgctttaaggtcaatggcagaaaaggaaatatcttcgtttcaaaactagacagaatcattcccacaaactgcgttgtgatgtgtttcttcaactcacagagtttaacctttctgttcatagagcagttaggaaacgctctgtttgtaaagtctgtaagtggatattctgacatcttgtggccttcgttggaaacgggatttcttcctattctgctagacagaagaaatctcagtaacttccttgtgttgtgtgtattcaactcacagagttgaacgatcctttacacagagcagatttgaaacaatgtttttgtggaatttgcaagtggagatttcagccgctttgaggtcaatggcagaaaaggaaatatcttcttatagaaactagacagaatgattctcagaaactcctttgtgatgtgtgtgttcaactcacagagtttaacctttcttttcatagagcagttagtaaacactctgtttataaagtctgcaagtggatattcagaccccttgaggccttcgttggaaacgggatttcttcatattatgctagacagaagaattctcagtaacttccttgtgttgtgtgtattcaactgacagagttgaactttcatttagagagagcagatttgaaacactgtttttgtggaatttgcaagtggagatttcaagcgctttggggccaaaggcagaaaaggaaatatcttcgtttaaaaactagacagaatcattctcagaaactgctgcgtgatgtgtgcgttcaactctcagagtttaacttttcttttcattcagcggtttggaaacactctgtttgtaaagtctgcacgtggaaattttgaccacttagaggccttcgttggaaacgggtttttttcatgtaaggcaagacagaagaattcccaggaacttccttgtgttgtgtacattcaactcacagagttgaacgttcccttagacagagcagatttgaaacaccctttttgtgcaattggcaagtggtgatttcagccgctttgaggtcaatggtagaaaaggaaatatcttcgtataaaaactagacagaatcattcccacaaactgcgttgtgatgtgttcgttcaactcacagagtttaacctttctgttcacagagcagttaggaaacactctgtttgtaaagtctgtaagtggatattctgacatcttgtggccttcgttggaaacgggatttcttcatattctgctagacagagaagattctcagaaacttccttgtgttgtgtgttttcaactcacagagttgaacgatgctttacacagagtagacttgaaacactctttttgtgtaatttgcaagtggagatttcagccgctttgaagtcaatggtagaaaaggaaatatcttcgtataaaaactagacagatgattctcagaaactcctttgtgatgtgtgcgttcaactcacagagtttaacctttcttttcatagagcagttaggaaacactctgtttgtaaagtctgcaagtggatattcagacctccttgaggccttcgttggaaacgggatttcttcatattctgctagacagaagaattctcagtaacttccttgtgttgtgtgtgttcaactcacagagttgaactttcatttacacagagcagatttgaaacactctttttgtggaatttgcaaatggagatttcaagcgctttgaggccaaaggcagaaaaggaaatctcttcgtataaaaactagacagaatcattctcagaaactgctgcgtgatgtgtgcgttcaactctcagagtttaacttttgttttcattcagcggtttggaaacactctgtttgtaaagtctgcacgtggatattttgaccacttagaggccttcgttggaaacgggtttttttcatgtaaggctagacagaagaattcccagtaacttccttgtgttgtgtgcattcaactcacagagttgaacgttcccttagacagagcagatttgaaacactctatttgtgcaatttgcaagtgtagatttcaagcgctttaaggtcaatggcagaaaaggaaatatcttcgtttcaaaactagacagaatcattcccacaaactgcgttgtgatgtgttcgttcaactcacagagtttaacctttcttttcatagaccagttaggaaacagtctgtttgtcaattctgtaagtggatattctgacatcttgtggccttcgttggaaacgggatttcttcatattctgctagacagaagaattctcagaatcttccttgtgttgtgtgtattcaactcacacagttgaacgattgtttacacagagcagatttgaaacactctttttgtggaatttgcaagtggagatttcagccgcattgaggtcaatggtagaaaaggaaatatcttcgtataaaaactagacagaatgattctcagaaactcctttgtgatgtgtgcgttcaactcatagagtttaacctttcttttcatagagcagttaggaaacactctgtttgtaaagtctgcaagtggatattcagacctctttgaggccttcgttggaaacgggatttcttcatattctgttagacagaagaattctcagtaacttccttgtgttgtgtgtattcaactcacagagttgaacgatcctttacacagagcagacttgaaacactctttttgtggaatttgcaagtggagatttcagccgctttgaggtcaatagtagaaaaggaaaactatcttcatataaagactagacagaatcattctcagaaactgctctgtgatgtgtgcgttcagctctcagagtttaacttttcttttcattcagcagtttggaaacactctgtttgtaaagtctgcacgtggatattttgaccacttagaggccttcgttggaaacgggtttttttcctgtaaggctagacagaagaattctcagtaacttccttgtgttgtgtgtattcaactcacagagttgaatgatcctttacacagagcagacttgaaacactctttttgtggaatttgcaagtggagatttcagccgctttaagttcaatggtagaataggaaatatcttcctatagaaactagacagaatgattctcagaaactcctttgtgatgtgtgcgttcaactcacagagttcaacctttcttttcatagagcagttgggaaacactctgtttgtaaagtctgcaagtggatattcagacttctttgagaccttcgttggaagcgggatttttacatattctgctacacagaagaattctcagtaacttccttgttttgtgtgtattcaactcacagagttgaacgatcctttacacagagcagacttgaaacactctttttgtggaatttgcaagtggagatttcagccgctttgaggtcaatggtagaataagaaatatcttcctatagaaactagacagagtgattctcagaaactcctttgtgatgtctgcgtttaactcacagagtttaacctttcttttcatagagcagttaggaaacactctgtttgtaaagtgtgcaagtggatattcagacctccttgaggccttcgttggaaacgggatttcttcatattatgctagacagaagaattcccagtaacttcgttgtgttgtgtacattcaactcacagagttgaacgttcccttagagagagcagatttgaaatactctttttgtgcaattggcaagtggagatttcaagcgctttaaggtcaatggcagaaaaggaaatatcttcgtttcaaaactagacagaatcattctcagaaactgctgcgtgatgtgtgcgttcaactctcagagtttaacttttcttttcattcagcggtttggaaacactctgtttgtaaagtctgcacgtggatattttgaccacttagaggccttcgttggaaacgggtttttttcatgtaaggctagacagaagaattcccagtaacttccttgtgttgtgtgcattcaactcacagagttgaacgttcccttagacagagcagatttgaaacactccatttgtgcaatttgcaagtgtagatttcaagcgctttaaggtcaatggcagaaaaggaaatatcttcgtttcaatactagacagaatgattctcagaaactcctttgtgatgtgtgcattcaactcacagagtttaacctttcttttcacagagcagttaggaaacacactgtttgtaaagtctgcaagtggatattcagacctccttgaggccttcgttggaaacgggatttcatcatattatgctagacagaagaattctcagtaacttccttgtgttgtgtgtattcaactcacagagttgaacgatcctttacacagagcagacttgaaacactctttttgtggaatttgcaagtggagatttcagccgctttgaggtcaatggtagaataggaaatatctttctatagaaactagacagaatgattctcagaaaatcctttgtgatgtgtgcgttcaactcacagagtttaacctttcttttcatagagcagttaggaaacactctgtttgtaaagtctgcaagtggatattcagacccccttgaggccttcgttggaaacgggatttctacatattatgctagacagaagaattctcagtaacttccttgtgttgtgtgtattcaactcacagagttgaacgatcctttacacagagcagacttgaaacactctttttgtggaatttgcaagtggagatttcagccgctttgaggtcaatggtagaataggaaatatcttcctatagaatctagacacaacgattctcagaaactcctttgtgatgtgtgcgttcaactcacagagtttaacctttcttttcatagagcagttaggaaacactctgtttgtaaagtctgcaagtggatattcagacctctttgaggccttcgttggaaacgggtttttttcatataaggctagacagaagaattcccagtaacttccttgtgttgtgtgcattcaactcacagagttgaacgttcccttagacagagcagatttgaaacactctatttgtgcaatttgcaagtgtagatttcaagcgctttaaggtcaatggcagaaaaggaaatatcttcgtttcaaaactagacagaatcattcccacaaactgcgttgtgatgtgctcgttcaactcacagagtttaacatttctgttcatagagcagttaggaaacactctgtttgtaaagtctgtaagtggatattcagacatcttgtggccttcgttggaaacgggatttcttcctattctgctagacagaagaattctcagtaacttccttgtgttgtgtgtattcaactcacagagttgaacgatcctttacagagagcagacttgaaacactctttttgtggaatttgcaagtggagatttcagccgctttgaggtcaatggtagaataggaaatatcttcctatagaaactagacagaatgattctcagaaacttctttgtgatgtgtgcgttgaactcacagagtttaacctttcttttcatagagcagttaggaaacactctgtttgtaaactctgcaagtggatattcagacctctttgaggccttcgttggaaacgggatttcttcatattatgcctgagagaagaattcccagtaacttccttgtgttgtgtgtgttcaactcacagagttgaactttcatttacacagagcagatttgaaacactctttttgtggaatttgcaaatggaggtttcaagccctttgaggccaaaggcagaaaaggaaatatcttcgtataaaaactagacagaatcattctcagagactgctctgtgatgtgtgcgttcaactctcagagtttaacttttcttttcattcagcagtttggaaacactctgtttgtaaagtctgcacgtggataatttgaccacttagagaccttcgttggaaacgggtttttttcatgtaaggctagacagaagagttctcagtaacttccttgtgttgtgtgtattcaactcacacagttgaacgatcctttacagagagcagacttgtaacactctttttgtggaatttgcaagtggagatttcagccgctttgaagtcaaagtagaaaaggaaatatcttcctatagaaactagacagaatcattcccacaaactgcgttgtgatgtgttcgttcaactcacagagtttaacctttcttttcatagagcagttaggaaacagtctgtttgtaaattctgtaagtggatactctgacatcatgtggccttcgttggaaacgggatttcttcatattctgctagacagaagaattctcagaatcttccttgtgttgtgtgtattcaactcacagagttgaacgatggtttacacagagcagatttgaaacactctttttgtggaatttgcaagtggagatttcagccgctttgaggtcaatggtagaaaaggaaatatcttcggtataaaaactagacagaatgattctcagaaactcctttgtgatgtgtgcgttcaactcacagagattaacttttcttttcatagagcagttaggaaacactctgtttgtaaagtctgcaagtggatattcagacctctttgtggccttcgttggaaacgggatttcttcatattatgctacacagaagaattcaagtaacttccttgtgttgtgtgtgttcaactcacagagttgaactttgatttacacagagcagatttgaaacactctttttgtggaatttgcaagtggagatttcaagcgctttgaggccaaaggcagaaaaggaaataccttcgtataaaaactagacagaatcattctcagaaactgctgcgtgatgtgtgcgttcaactctcagagtttaacttttcttttcattcagcggtttggaaacactctgtttgtaaagtctgcacgtggatattttcaccacttagaggccttcgttggaaacgggttttttcatgtaaggctagacagaagaattcccagtaacttccttgtgttgtgtgcattcaactcacagagttgaacgttcccttagacagagcagatttgaaacactctatttgtgcaatttgcaagtgtagatttcaagcgctttaaggtcaacggcagaaaaggaaatatcttcgtttcaaaactagacagaatcattcccacaaactgcgttgtgatgtgttcgttcatctcacagagtttaacctttcttttcgtagagcagttaggaaacagtctgtttgtaaattctgtaagtggatattctgacatcttgtggccttcgttggaaacgggatttcttcatattctgctagacagaagaattctcagtaactttccttgtgttgtgtgtattcaactcacagagttgaacgatcctttacacagagcagacttgaaacactctttttgtggaatttgcaagtggagatttcagccgctttgaggtcaatggtagaaaaggaaatatcttcgtataaagactagacagaatgattctcataaactcctttgtgatgtgtatgttcaactcacagagtttaacttttctattcatagagtagttaggaaacactctgtttgtaaagtctgcaagtggatattttgacctctttgaggccttcgttggaaacgggtttttttcatgtaaggctagacagaagaattcccagtaacttccttgtgttgtgtgtgttcaactcacagagttgaactttcatttacacagagcagatttgaaacactctttttgtggaatttgcaagtggagatttcaagcgctttgaggccaaaggcagaaaaggaaatatcttcgtataaaaacttgacagaatcattctcagaaactgctgcgtgatgtgtgcgttccactctcagagtttaacttttcttttcattcagcggtttggaaacactctgtttgtaaagtctgcacgtggatattttgaccacttagaggccttcgttggaaacgggttttttttcatgtaaggctagacagaagaattcccagtaacttccttgtgttgtgtgcattcaactcacagagttgaacgttcccttagacagagcagatttgaaacactctatttgtgcaatttgcaagtgtagatttcaagcgctttaaggtcaacggcagaagaggaaatatcttcgtttcaaaactagacagaatcgttctcagaaactgctctgcgatgtgtgcgttcaactctcagagtttaacttttcttttcattcagcagtttggaaacactctgtttgtatagtctgcacgtggataatttgaccacttagaggccttcgttggaaacgggtttttttcatgtaaggctagacagaagaattctcagtaacttccttgtgttgtgtgtattcaactcacacagttgaacgatcctttacacatagcagacttgtaacactctttttgtggaatttgcaagtggagattccagccgctttgaagtcaaatgtagaaaaggaaatatcttcctataaaaactagacagaatgattctcagaaactcctttgtgatgtgtgcgttcaactcacagagtttaacctttcttttcatagagcagttaggaaacacgctgtttgtaaagtctgcaagtggatattcagacctgtttgaggccttcgttggaaacgggtttttttcatataaggctagacagaagaattctcagtaacttccttgtgtggtgtgtattcaactgacagagttgaactttcatttagagagagcagatttgaaacactgtttttgtggaatttgcaagtggagatttcaagcgctttggggccaaaggcagaaaaggaaatatcttcgtataaaaactagacagaaacattctcagaaactgatgcgtgatgtgtgcgttcaactctcagagtttaacttttcttttcattcagcggtttggaaacactctgtttgtaaagtctgcacgtggaaattttgaccacttagaggccttcgttggaaacgggtttttttcatgtaaggctagacagaagaattcccagtaacttccttgtgttgtgtacattcaactcacagagttgaacgttcccttagacagagcagatttgaaacactctttttgtgcaattggcaagtggtgatttcagccgctttgaggtcaatggtagaaaaggaaatatcttcgtataaaaactagacagaacgattcacagaaactcctttgtgatgtgtgcgttcaactcacagagtttaacctttcttttcatagagcagttaggaaacactctgtttgtaaagtctgcaagtggatattcagacctctttgaggccttcgttggaaacgggatttcttcatattctgctagacagaagaattctcagtaacttccttgtgttgtgtgtattcaactcacagagttgaacgatcctttacacagagcagacttgaaacactctttttggggaatttgcaagtggagatttcagccgctttgaggtcaatggtagaaaaggaaactatcttcatataaagactagacagaatgattctcagaaactcctttgtgatgtgtgcgttcaactcacagagtttaacctttctgttcatagagcagttaggaaacactctgtttgtaaagtctgcaagtggatattcagacctccttgaggccttcgttggaaacgggatttcttcatattctgctagacagaagaattcccagtaacttccttgtgttgtgtgtgttcaactcacagagttgaactttcatttacacagagcagatttgaaacactctttttgtggaatttgcaagtggagatttcaagcgctttgaggccaaaggcagaaaaggaaatatcttcgttccaaaactagacagaatcattctcagaaactgctctgcgatgtgtgccttcaactctcagagtttaacttttgttttcattcagcagtttggaaacactctgtttgtaaagtctgcacgtggatattttgaccacttagaggccttcgttggaaatgggtttttttcctgtaaggctagacagaagaattcccagtaacttccttgtgttgtgtacattcaactcacagagttgaacgttcccttagacagagcagatttgaaacactctttttgtgcaattggcaaatggagatttcaagcgctttaaggtcaatggcagaaaaggaaatatcttcgtttcaaaactagacagaatcattcccacagactgcgttgtgatgtgttcgttcaactcacagagtttaacctttcttttcatagagcagttaggaaacagtctgtttgtcaattctgtaagtggatattctgacatcttgtggccttcgttggaaacgggatttcttcatattctgctagacagaacaattctcagtaacttccttgtgttgtgtgtattcaactcacagagttgaacgatcctttacacagagcggacttgaaacactctttttgtggaatttgcaattggagatttcagccgcgttgaggtcaatggtagaaaaggaaatatcttcgtataaaaactagacagaatgattctcagaaactcctttgtgatgtgtgtgttcaactcacagagtttaacctttcttttcatagagcagttaggaaacactctgtttgtaaagtttgcaagtggatattcagacctctttgaggccttctttggaaacgggtttttttcatgtaaggctagacagaagaattctcattaacttccttgtgttgtgtttattcaactcacagagttgaatgatcctttacacagagcagacttgaaacactctttttgtggaatttgcaagtggagatttcagccgctttgaggtcaatagtagaaaaggaaatatcttcgtagaaaaactagacagaatcattctcagaaaccgctctgtgatgtgtgcgttcaactctcagagtttaacctttcttttcatagagcagttaggaaacactctgtttgtaaagtctgcacgtggatattttgaccacttagaggccttcgttggaaacgggtttttttcatgtaaggctagacagaagaattcccagtaacttccttgtgttgtgtacattcaactcacagagttgaacgttcccttagacagagcagacttgtaacactctttttgtggaatttgcaagtggagatttcagccgctttgaagtcaaaggtagaaaaggaaatatcttcatataaaaactagacagaatcattcccacaaactgcgttgtgatgtgttcgttcaactcacagagtttaacctttctgttcatagagcagttaggaaacactctgtttgtaaagtctgcaagtggatattcagacctcctagaggccttcgttggaaacgggatttctccatattctgctagacagaagaattctcagtaacttccttgtgttgtgtgtattcaactcacagagttgaacgatcctttacacagagcggacttgaaacactctttttgtgtaatttgcaagtggagatttcagccgcgttgaggtcaatggtagaaaagaaaatatcttcgtataaaaactagacagaatgattctcagaaactcctttgtgatgtgtgcgttcaactcacagagtttaacctttcttttcatagagcagttaggaaacacctctgtttgtaaagtctgcaagtggatattcagacctccttgaggccttcgttggaaacgggattttttcatattatgctagacagaagaattccctgtaacttccttgtgttgtgtgtgttcgactcacagagttgaactttcatttacacagagcagatttgaaacactctttttgtggaatttgcaagtggagatttcaagcgctttgaggccaaaggcagaaaaggaaatatcttcgtttcaaaactagacagaatcattctcagaaactgctctgcgatgtgtgcgttcaactctcagagtttaacttttcttttcattcagcagtttggaaacactctgtttgtaaagtctgcacgtggatattttcaccacttagaggccttcgttggaaacgggtttttttcctgtaaggctagacagaagaattcccagtaacttcattgtgttgtgtacattcaactcacagagttgaacgttcccttagacagagcagatttgaaacactctttttgtgcaattggcaagtggagatttcaagcgctttaaggtcaatggcagaaaaggaaatatgcttcgtttcaaaactagacagaatcattcccacaaactgcgttgtgatgtgttcgttcaactcacagagtttaacctttcttttcatagagcagttaggaaacagtctgtttgaaaattctgtaagtggatattctgacatcttgtggccttcgttggaaacgggaattcttcatattctgctagacagaagaattctcagtaacttccttgtgttgtgtgtattcaactcacggagttgaactatcctttacacagagcagacttgaaacactctttttgtggaatttgcaagtggagatttcagccgctttgtggtctatagtagaaaaggaaatatcttcgtagaaaaactagacagaatgattctcagaaactcctttgtgatgtgtgtgttcaactcacagagtttaacctttcttttcatagagcagttagtaaacactctgtttataaagtctgcaagtggatattgagacccctttgaggccttcgttggaaacgggatttcttcatattatgctagacagaagaattctcagtaacttcccttgtgttgtgtgtattcaactgacagagttgaactttcatttagagagagcagatttgaaacactgtttttgtggaatttgcaagtggagatttcaagcgctttggggccaaaggcagaaaaggaaatatcttcgtataaaaactaggcagaatcattctcagaaactgctctgcgatgtgtgcgttcaactctcagagtttaacttttcttttcattcagcagtttggaaacactctgtttgtaaagtctgcacgtggatattttggccacttagaggccttcgttggaaacgggtttttttcctgtaaggctagacagaagaattcccagtaacttccttccgttgtgtacattcaactcacagagttgaacgttcccttagacagagcagatttgaaacactctttttgtgcaattggcaagtggagatttcaagcgctttgaggtcaatggcagaaaaggaaatatcttcgtttcaaaactagacagaatcattcccacaaactgcgttgtgatgtgttcgttcaactcacagactttaacctttcttttcatagagcagttaggaaacagtctgtttgtaaataatgtaagtggatattctgacatcttgtggccttcgttggaaacgggatttcttcatattctgctagacagaagaattctcagtaacttccttgtgttgtgtgtattcaactcacagagttgaacgatcctttacagagagcagacttgaaacactctttttgtggaatttgcaagtggagatttcagccgctttgaggtcaatggtagaaaaggaaatatcttcgtataaagactagacagaatgattctcagaaactcctttgtgatgtgtgtgttcaactcacagagtttaacgtttcttttcatagagcagttagtaaacactctgtttataaagtctgcaagtggatattcagacctctttgaggtcttcgttggaaacgggatttcttcatattatgctagacagaagaattcccagtaacttccttgtgttgtgtgtgttcaactcacagagttgaactttcatttacacatagcagatttgaaacactctttttgtggaatttgcaagtggagatatcaaacgctttgaggccaaaggcagaaaaggaaatatcttcgcataaaaactagacagaatcattctcagaaactgctctgcgatgtgtgcgttcaactctcagagtttaacttttcttttcattcagcagtttggaaacactctgtttgtaaagtctgcacgtggataatttgaccacttagaggccttcgttggaaacgggtttttttcatgtaaggctagacagaagaattctcagtaacttccttgtgttgtgtgtattcaactcacagagttgaacgatcctttacacacagcagacttgtaacactctttttgtggaattcgcaagtggagatttcagccgctttgaagtcaaaggtagaaaaggaaatatcttcctataaaaactagacagaatcattcccacaaactgccttgtgatgtgttcgttcaactcacagagtttaacctttctgttcatagagcagttaggaaacactctgtttgtaaagtctgtaagtggatattctgacatcttgtggccttcgttggaaacgggatttcttcatattctgctagacagaagaattctcagtaacttctttgtgttgtgtgtattcaactcacagagttgagcgatcctttacacagagcagacttgaaacactcgttttgtggaatttgcaagtggagatttcagccgctttaaggtcaatggtagaaaaggaaatatcttcgtataaaaactagacagaatgattctcagaaaatcatttgtgatgtgtgcgttcaactcacagagtttaacttttcttctcatagagcagttaggaaacactgtttgtaaagtctgcaagtggatattcagacctctttgaggccttcgttggaaacgggatttcttcatattctgctagacagaagaattctcagtaacttccttgtgttgtgtgtattcaactcacagagttgaacgatcctttacacagagcagacttgaaacactctttttgtggaatttgcaagaggagatttcagccgctttgaggtcaatggtagaataggaaatatcttcatatagaaactagacagaatcattctcagaaactgctgtgtgatgtgtgcgttcaactctcagagtttaacttttcttttcattcagcggtttggaaacactctgtttgtaaagtctgcacgtggatattttgaccacttagaggccttcgttggaaacgggattttttcatgtaaggctagacagaagatttcccagtaacttccttgtgttgtgtacattcaactcacagagttgaacgttcccttagacagagcagatttgaaacactctttttgtgcaattggcaagtggagatttcaagcactttaaggtcaatggcagaaaaggaaatatcttcgtttcaaaactagacagaatcattcccacaaactgcgttgtgatgtgttcgttcaactcacagagtttaacctttctgttcatagagcagttaggaaacactctgtttgtaaagtctgtaagtggatattctgacatcttgtggccttcgttggaaacgggatttcttcatattctgctagacagaagaattctcagtaacttccttgtgttgtgtgtattcaactcacagagttgaacgatcctttacacagagcagacttgaaacactctttttgtggaatttgcaagtggagatttaagccgctttgaggtcaatagtagaaaggaaatatcttcgtagaaaaactagacagaacgattctcagaaactcctttgtgatgtgtgcgttcaactcacagagtttaacctttcttttcatagagcagttaggaaacactctgtttgtaaagtctgcaagtggatattcagacctctttgaggccttcgttggaaacgggatttcttcatattctgctagacagaagaattctcagtaacttccttgtgttgtgtgtattcaactcacagagttgaacgatcctttacacagagcagacttgaaacactctttttgtggaatttgcaagtggagatttcagccgctttgaggtcaatagtagaaaaggaaatatcttcgtagaaaaagtagacagaatcattctcagaaaatcctctgtgatgtgtgcgttcaactctcagagtttaacttttcttttcattcagcagtttggaaacactctgtttgtaaagtctgcacgtggatattttgaccacttagaggccttcgttggaaacgggtttttttcatgtaagggtagacagaagaattcccagtaacttccttgtgttgtgtgcattcaactcacagagttgaactttcctttagacagagcagatttgaaacactctatttgtgcaatttgcaagtgtagatttcaagcgctttaaggtcaatggcagaaaaggaaatatcttcgtttcaaaactagacagaatgatactcagaaactcctttgtgatgtgggcgttcaactcacagagtttaacctttcttttcataggagcagttaggaaacactctgtttgtaaagtctgcaagtggatattcagacctctttgaggccttcgttggaaacgggatttcttcatattatgctagacagaagatttctcagtaactttccttgtgttgtgtgtattcaactcacagagttgaacgatcctttacacagagcagacttgaaacactctttttgtggaatttgcaagtggagatttcagccgctttgagttcaatggtagaataggaaatatcttccaatagaaactagacagaatgattctcagaaactcctttgtgatgtgtgcgttcaactcacagagtttaacctttcttttcatagagcagttaggaaacactctgtttgtaaagtctgcaagtggatatacagacctctttgaggccttcgttggaaacgggatttcttcatattctgctagagagaagaattcccagtaacttccttgtgttgtgtgtgttcaactcacagagttgaactttcatttacacagagcagatttgaaacactctttttgtggaatttgcaagtggagatttcaagcgctttgaggccaaaggcagaaaaggaaatatcttcggtataaaaactagacagaatcattctcagaaactgctgcgtgatgtgtgcgttcaactgtcagagtttaacttttcttttcattcagcggtttggaaacactctgtttgtaaagtctgcacgtggatattttgaccacttagaggccttcgttggaaacgggtttttttcatgtaaggctagacagaagaattctcagtagcttccttgtgttgtgtgcattcaactcacagagttgaacgttcccttagacagagcagatttgaaacagcctatttgtgcaatttgcaagtgtagatttcaagcgctttaaggtcaacggcagaaaaggaaatatcttcctttcaaaactagacagaatcattcccacaaactgggttgtgatgtgttcgttcaactcacagagtttaacctttctgttcatagagcagttaggaaacactctgtttgtaaagtctgtaagtggatattctgacatcttgtggccttcgttggaaacgggatttcttcatattctgctagacagaagaattctcagtaacttccttgtgttgtgtgtattcaactcacagagttgaacgatcctttacacagagcagtcttgaaacactctttttgtgtaatttgcaagtggagatttcagccgctttgaggtcaatagtagaaaaggaaatatcttcgtagaaaaactagacagaatgattctcagaaactcctttgtgatgtgtgcgttcaactcagagtttaacctttcttttcatagagcagttaggaaacactctgtttgtaaagtctgcaagtggatattcagacctctttgaggccttcgttggaaacgggtttttttcatataaggctagacagaagaattcccagtaacttccttgtgttgtgtgtgttcaactcacagagttgaactttcatttacacagagcagatttgaaacactctttttgtggaatttgcaagtggagatttcaagcgctttgaggccaaaggcagaaaaggaaatatcttcgtttcaaaactagagagaatcattctcagaaactgctctgcgatgtgtgcgttcaactctcagagtttaactttgcttttcattcagcagtttggaaacactctgttagtaaagtctgcacgtggataatttgaccacttagaggccttcgttggaaacgggtttttttcatgtaaggctagacagaagaattcccagtaacttccttgtgttgtgtacattcaactcacagagttgaacgttcccttagacagagcagatttgaaacactctttttgtgcaattggcaaatggagatttcaagcgctttaaggtcaatggcagaaaaggaaatatcttcgtttcaaaactagacagaatcattcccacaaactgcgttgtgatgtgttcgttcatctcacagagtttaacctttcttttcgtagagcagttaggaaacagtctgtttgtaaattctgtaagtggatatcctgacatcttgtggccttcgttggaaacgggatttcttcatattctgctagacagaagaattctcagaatcttccttgtgttgtgtgtattcaactcacacagttgaacgattgtttacacagagcagatttgaaacactctttttgtggaatttgcaagtggagatttcagccgctttgaggtcaatggtagaaaaggaaatatcttcgtataaaaactagacagaatgattctcagaaactcctttgtgatgtgtgtgttcaactcacagattttaacctttcttttcctagagcagttagtaaacactctgtttataaagtctgcaagtggatattcagacccctttgaggccttcgttggaaacgggatttcttcatattatgctagacagagaattcccagtaacttccttgtgttgtgtgtgttcaactcacagagttgaactttcatttacacagaacagatttgaaacactctttttgtggaatttgcaagtggagatttcaagcgctttgaggccaaaggcagaaaaggaaatatcttcgtttcaaaactagacagaatcattctcagaaactgctctgcgatgtgtgcgttcaactctcaaagtttaacttttcttttcattcagcagtttggaaacactctgtttgtaaagtctgcacgtggataacttgaccacttagaggccttcgttggaaacgggtttttttcatttaaggctagacagaagaattcccagtaacttccttgtgttgtgtacattcaactcacagagttgaacgttcccttagacagagcagatttgaaacactctttttgtgcaattggcaagtggagatttcaagcgctttaaggtcaatggcagaaaaggaaatatcttcgtttcaaaactagacggaatcattcccacaaactgcgttgtgatgtgttcgttcatctcacagagtttaacctttcttttcatagagcagttaggaaacactctgtttgtaaattctgtaagtggatattctgacatcttgtggccttcgttggaaacgggatttcttcatattctgctagacagagaagattctcagtaacttccttgtgttgtgtgtattcaactcacagagttgaacgatcctttacacagagcagacttgaaacattctttttgtcgaatttgcaagtggagatttcagccgctttgaggtcaatggtagaataggaaatatcttcctatagaaactagacagacgattctcagaaactcctttgtgatgtgtgcgttcaactcacagagtttaacctttcttttcatagagcagttaggaaacactctgtttgtaaagtctgcaagtggatattcagacctctttgaggccttcgttggaaacgggatttcttcctattctgctagacagaagaattctcagtaacttccttgtgttgtgtgtattcaactcacagagttgaaggatcctttacactgagcagacttgaaacactctttttgtggaatttgcaagtggagatttcagccgctttgaggtcaatggtagaaaaggaaactatcttcatataaagactagacagaatcattctcagaaactgctctgcgatgtgtgcgttcaactctcagagtttaacttttcttttcattcagcagtttggaaacactctgtttgtaaagtctgcacgtggatattttgaccactcagaggccttcgttggaaacgggtttttttcctgtaaggctagacagaagaattcccagtaacttccttgtgttgtgtgcattcaactcacagagttgaacgttcccttagacagagcagatttgaaacactctatttgtgcaatttgcaagtgtagttttcaagctctttaaggtcaacggcagaaaaggaaatatcttcgtttcaaaactagacagaatcattcccacaaactgcgttgtgatgtgttcgttcaactcacagagtttaacctttctgttcatagagcagttaggaaacactctgtttgtaaagtctgtaagtggatattctgacatattgtggccttcgttggaaacgggatttcttcatattctgggcctagacagaagaattgtcagtaacttccttgtgttgtgtgtattcaactcacagagttgaacgatcctttacacagagcagacttgaaacactctttttgtggaatttgcaagtgtagttttcagccgctttgaggtcaatggtagaataggaaatatcttcctatagaaactagacagaatgattctcagaaactcctttgtgatgtgtgcgttcaactcacagagtttaacctttcttttcatagagcagttaggaaacactctgcttgtaaagtctgcaagtggatattcagccctctttgaggccttcgttggaaacgggtttttttcatataaggctagacagaagaattcccagtaacttcccttgtgttgtgtgtattcaactcacagagttgaactttcatttacacagagcagatttgaaacactctttttgtggaatttgcaagtggagatttcaagcgctttaaggccaaaggcagaaaaggaaatatcttcgtataaaaactagacagaatcattctcagaaactgctctgcgatgtgtgcgttcaactctcagagtttaacttttcttttcattcagaagtttggaaacactctgtttgtaaagtctgcacgtggataacttgaccacttagaggccttcgttggaaacgggtttttttcatgtaaggctagacagaagaattcccagtaacttgccttgtgttgtgtacattcaactcacagagttgaacgttcccttagacagagcagatttgaaacactctttttgtgcaattggcaaatggagatttcaagcgctttaaggtcaatggcagaaaaggaaattgttcgtttcaaaactagacagaatgattctcagaaacttctttgtgatgtgtgcgttcaactcacagagtttaacctttcttttcatagagcagttaggaaacactctgtttgtaaactctgcaagtggatattaagacctctttgaggtcttcgttggaaacgggatttcttcatactgtgctagacagaagaattctcagtaacttccttgtgttgtgtgtattcaactcacagagttgaacgatcctttacacagagcggacttgaaacactctttttgtggaatttgcaagtggagatttcagccgcgttgaggtcaatggtagaaaaggaaatctcttcgtataaaaactagacagaatgattctcagaaactcctttgtgatgtgtgcgttcaactcacagagtttaacctttctgttcatagagcagttaggaaacactctgtttgtaaagtctgcaagtggatattcagacctccttgaggccttcgttggaaacgggatttcttcatcttctgctagacagaagaattctcagtaacttcccttgtgttgtgtgtattcaactgacagagttgaactttcatttagagagagcagatttcaaacactgtttttgtggaatttgcaagtggagatttcaagcgctttggggtcaaaggcagaaaaggaaatatcttcgtataaaaactagacagaatcattctcagaaactgctctgtgatatgtccgttcaactctcagagtttaacttttcttttcattcagcagtttggaaacactctgtttgtaaagtctgcacgtggataatttgaccacttagaggccttcgttggaaatgggtttttttcatgtaaggctagacagaagaattcccagtaacttccttgtgttgtgtacattcaactcacagagttgaacgttcccttagacagagcagatttgaaacactctttttgtgcaattggcaagtggagatttcaagcgctttaaggtcaatggcagaaaaggaaatatcttcgtttcaaaactagacagaatgattctcagaaagtcctttgtgatgtgtgcgttcaactcacagagtttaccctttctgttcatagagcagttaggaaacactctgtttgtaaattctgcaagtggatattcagacctacttgaggtcttcggtggaaacgggacttcttcatattctgttagacagaagaattctcagtaacttccttgtgttgtgtgtattcaactcacagagttgaacgatcctttacacagagcagacttgaaacactctttttgtggaatttgcaagtggagatttcatccgctttgaggtcaatggtagaaaaggagactatcttcatataaagactagacagaatgattctcagaaactcctttgtgatgtgtgcgttcaactcacagagttgaacctttcttttcatagagcagttgggaaacactctgtttgtaaagtctgcaagtggatattcagacttctttgaggccttcgttggaagcgggatttcttcatattctgctagacagaagaattctcagaaacttccttgtgttgtgtgtattcaactgacagagttgaactttcatttagagagagcagatttgcaacactgtttttgtggaatttgcaagtggagatttcaagcgctttggggccaaaggcagaaaaggaaatatcttcggataaaaactagacagagaatcattctcagaaactgctctgcgatgtgtgcgttcaactctcagagtttaacttttcttttcattcagcagtttggaaacactctgtttgtaaagtctgcacgtggatattttgaccacttagaggccttcgttggaaacgggtttttttcctgtaaggctagacagtagaattcccagtaacttccttgtgttgtgtacattcaactcacagagttgaacgttcccttagacagagcagatttgaaacacactttttgtgcaattggcaagtggagatttcaagcgctttaaggtcaatggcagaaaaggaaatatcttcgtttcaaaactagacagaatcattcccacaaactgcgttgtgatgtgttcgttcatctcacagagtttaacctttcttttcatagtgcagttaggaaacactctgtttgtaaattctgtaagtggatattctgacatcttgtggccttcgttggaaacgggaattcttcatattctgctagacagaataattctcagtaacttccttgtgttgtgtgtattcaactcagagagttgaacgatcctttacagagagctgacttgaaacactctttttgtggaatttgcaagtggtgatctcagccgctttgaggtcaatggtagaataggaaatatcttcctatagaaagtagacagaatgattctcagaaactcctttgtgatgtgtgcgttcaactcacagagtttaacctttcttttcatagagcagttaggaaacactctgtttgtaaagtctgcaagtggatattcagacctccttgaggccttcgttggaaacgggtttttttcatataaggctagacagaagaattcccagtaacttccttgtgttgtgtgtgttcaactcacagagttgaactttcatttacacagagcagatttgaaacactctttttgtggaatttgcaagtggagatttcaagcgctttgaggccaaaggcagaaaaggaaatatcttcgtttcaaagctagacagaatcattctcagaaactgctgcatgatgtgtgcgttcaactgtcagagtttaacttttcttttcattcagcggtttggaaacactctgtttgtaaagtctgcacgtggatattttgaccacttagaagccttcgttggaaaagggtttttttcatgtaaggctagacagaagaattcccagtaacttccttgtgttgtgtgcattcaactcacagagttgaacgttcccttagacagagcagatttgaaacactctatttgtgcaatttgcaagtgtagatttcaagcgctttaaggtcaatggcagaaaaggaaatatcttcgtttcaaaactagacagaatcattcccacaaactgcgttgtgatgtgttcgttcaactcacagagtttaacctttctgttcatagagcagttaggaaacactctgtttgtaaagtctgaaagtggatattctgacatcttgtggccttcgttgggaacgggatttcttcatattctgctagacagaagaattctcagaatcttccttgtgttgtgtgtattcaactcacagagttgaacgatggtttacacagagcagatttgaaacactctttttgtggaatttgcaagtggagatttcagccgctttgaggtcaatggtagaaaatgaaatatcttcgtataaaaactagacagaatgattctgagaaactcctttgtgatgtgtgcgttcaactcacacagtttaacctttcttttcatagagcagttaggaaacactctgtttgtaaagtctgcaagtggatattcagacctccttgaggccttcgttggaaacgggatttcttcatattatgctagacagaagaattctcagtaacttccttgtgttgtgtgtattcaactgacagagttgaactatcatttagagagagcagatttgaaacactgtttttgtggaatttgcaagtggagatttcaagcgctttggtgccaaaggcagaaaaggaaatatcttcgtataaaaactagacagaatcattctcagaaactgctctccgatgtgtgcgttcaactctcagagtttaacttttcttttcattcagcagtttggaaacactctgtttgtaaagtctgcacgtggataatttgaccacttagaggccttcgttggaaacgggttttttttcatgtaaggctagacagaagaattcccagtaacttccttgtgttgtgtgcattcaactcacagagttgaacgttcccttagacagagcagatttgaaacactctatttgtgcaattggcaagtgtagatttcaagcgctttaaggtcaatggcagaaaaggaaatatcttcgtttcaaaactagacagaatcattcccacaaactgcgttgtgatgtgttcgttcaactcacagagtttaacctttctgttcatagagcagttaggaaacactctgtttgtaaagtctgtaagtggatattctgacatcttgtggccttcgttggaaacgggatttcttcatattctgctagacagaagaattctcagaaacttccttgtgttgtgtgtattgaactcacagagttgaacgatcgtttacacagagcagacttgagacactctgtttgtgtaatttgtaagtggagatttcagccgctatgaggtcaatggtagaaaaggaaatatcttcatataaaaactagacagaatgattctcagaaactcctttgtgatgtgtgcgttcaactcacagagtttaacctttcttttcatagagcagttagtaaacactctgtttgtaaagtctgcaagtggatattcagacccctttgaggccttctttggaaacgggatttcttcatattctgctagacagaagaattctcagtaacttccttgtgttgtgtgcattcaactgacagagttgaactttcatttagagagagcagatttgaaacactgtttttgtggaatttgcaagtggagatttcaagcgctttggggccaaaggcagaaaaggaaatatcttcgtataaaaactagacagaatgattctcagaaactcctttgtgatgtgtgcgttcaactcacagagtttaacctttcttttcatagagcagttaggaaacactctccttgtaaagtctgcaagtggatattttgaccacttagaggccttcgttggaaacgggtttttttcatataaggctagacagaagaattcccagtaacttccttgtgttgtgtacattcaactcacagagttgaacgttcccttagacagagcagatttgaaacactatttttgtgcaattggcaagtggagatttcaagcgctttgaggtcaatggcagaaaaggaaatatcttcgtttcaaaactagacagaatcattcccacaaaactgcgttgtgatgtgttcgttcaactcacagagtttaacctttctgttcatagagcagttaggaaacactctgtttgtaaagtctgtaagtggatattctgacatcttgtggccttcgttggaaacgggatttcttcatattctgctagacagaagaattctcagtaacttccttgtgttgtgtgtattcaactcacagagttgaatgatcctttacacagaacagtcttgaaacactctttttgtggaatttgcaagtggagatttcatccgctttgaggtcaatggtagaatagggaatatcttcctatagaaactagacagaatgattctcagaaactcctttgtgatgtgtgcgttcaactcacagagtttaacctttcttttcatagagcagttaggaaacactctgtttgtaaagtctgcaagtggatattcagacatctttgaggctttcgttggaaacgggatttcttcatattctgctaggcagaagaattctcagaaacttcgatgtgttgtgtgttttcaactcacagagttcaacgatcatttacacagagtagacttgaaacactctttttgtggaattggcagggtggagatttcagccgctttgaggtcaaaggtagaaaaggaaatatcttcgtataaaaactagacagaatgattctaagaaactcctttgtgatgtgtgcgttcaactcacagagtttaacctttcttttcatagagcagttgggaaacactctgtttgtaaagtctgcaagtggatattcagacatccttgaggctttcgttggaaacgggatttcttcatattctgctagaaagaagaattctcagtaacttccttgtgttgtgtgtatgcaactcacagagttgaatgatcctttacacagagcagacttgaaacactctttttgtggaatttgcaagtggagatttcagccgctttgaggtcaatggtagaaaagtaaatatcttcgtataaagactagacagaatgattctcagaaactcctttgtgatgtgtgcgttcaactcacagagtttaacctttctgttcatagagcagttaggaaacactctgtttgtatagtctgcaagtggatattcagacctccttgaggccttcgttggaaacgggatttcttcaatattctgctagacagaagaattctcagtaacttccttgtgttgtgtgtattcaactcacagagttgaacgatcctttacacagagcagacttgaaacactctttttgtggaatttgcaagtggagatttcagccgctttcaggtcaatagtagaaaaggaaatatcttcgtagaaaaactagacagaatgattctcagaaactcctttgtgatgtgtgcgttcaactcacagagtttaacttttcttttcatagagccgttaggaaacactctgtttgtaaagtctgcaagtggatattcagacctctttgaggccttcgttggaaacgggatttcttcatattatgctagacagaagaattctcagtaacttccttgtgttgtgtgtattgaactcacagagttgaacgatcctttacacagagcagacttgaaacattctttttgtggaatttgcaagtggagatttcagccgctttgaggtcaatggtagaataggaaatatcttcctatagaaactagacagaatcattctcagaaactgctgcgtgatgtgtgcgttcaactctcagagtttaacttttcttttcattcagcggtttggaaacactctcgtttgtaaagcctgcacgtggatattttgaccacttagaggccttcgttggaaacgggtttttttcatgtaaggctagacagaagaattctcagtaacttccttgtgttgtgtgtattcaactcacagagttgaacgatcctttacacagagcagacttgaaacactctttttgtggaatttgcaactgtagatttcaagcgctttaaggtcaatggcagaaaaggaaatatcttcgtttcaaaactagacagaatgattctcagaaactcctttgtgatgtgtgcgttcaactcacagagtttaacctttctgttcatacagcagttaggaaacactctgtttgtaaagtctgcaagtggatattcagacctccttgaggccttcgttggaaacgggatttcttcatattctgctagacagaagaattctcagaaacttccttgtgttgtgtgttttcaactcacagagttgaacgatcctttacacagagcagacttgaaacactccttttgtggaatttgcaagtggagatttcagccgctttgagttcaatggtagaataggaaatatcttcctatagaaactagacagaatgattctcagaaactcctttgtgatgtgtgcgttcaactcacagagtttaacctttcttttcatagagcagttaggaaacactctgtttgtaaagtctgcaagtggatattcagacatccttgaggctttcgttggaaacgggatttcttcatattctgctagaaagaagaattctcagtaacttccttgtgttgtgtgtattcaactcacagagttgaacgatcctttacacagagcagacttgaaacactctttttgtggaatttgcaagtggagatttcagcctctttgaggtcaatggtagaataggaaatatcttcctatagaaagtagacagaatcattctcagaaactgctgcgtgatgtgtgcgttcaactctcagagtttaacttttcttttcattcagcggtttggaaacactctgtttgtaaagtctgcacgtggaaattttgaccacttagaggccttcgttggaaacgggtttttttcatgtaaggctagacagaagaattcccagtaacttccttgtgttgtgtacattcaactcacagagttgaacgttcccttagacagagcagatttgaaacactctttttgtgcaattggcaagtggagatttcaagcactttaaggtcaatggcagaaaaggaaatatcttcgtttcaaaactagacagaatcattcccacaaactgcgttgtgatgtgttcgttcaactcacagagtttaaactttcttttcatagagcagttaggaaacagtctgtttgtaaattctgtaagtggatattctgacatcttgtggccttcgttggaaacgggatttcttcatattttgctagacagaagaattctcagtaacttccttgtgttgtgtgtattcaactcacagagttgaatgatcctttacacagagcagacttgaaacactctttttgtggaatttgcaagtggagatttcagccgctttgaggtcaatggtagaaaaggaaactatcttcatataaagactagacagaatgattctcagaaactcctttgtgatgtgtgcgttcaactcacagagtttaacctttcttttcatagagcagttaggaaacactctctaaagtctgcaagtggatattcagacctccttgaggtcttcgttggaaacgggatttcttcatattctgccagacagaagaattctcagtaacttccttgtgttgtgtttattcaactcacagagttgaatgatcctttacagagagcagacttgaaacactctttttgtggaatttgcaagtggagatttcagccgctttgaggtcaatggtagaaaagtaaatatcttcctataaagactagacagaatgattctcagaaactcctttgtgatgtgggcgttcaactcacagtgtttaacctttcttttcatagagcagttgggaaacactctgtttgtaaagtctgcatgtggatatttggacttctttgaggctttcgttggaaacgggtttttttcatgtaaggctagacagaagaattcccagtaactttccttgtgttgtgtacgttcaactcacagagttgaacgttcccttagacagagcagatttgaaacactctttttgtgcaattggcaagtggagatttcaagcgctttaagttcaatggcagaaaaggaaatatcttcgtttcaaaactagacagaatcattcccacaaactgcgttgtgatgtgttcgttcatctcacagagtttaacctttcttttcatagagcagttaggaaacagtctgtttgtcaattctgtaagtggatattctgacatcttgtggccttcgttggaaacgggatttcttcatattctgctagacagaagaattctcagtaacttaccttgtgttgtgtgtattgaactcgcagagttgaacgatcctttacacagagcagacttgaaacactctttttgtggaatttgcaagtggagatttcagccgctttgaggtcaatagtagaaaaggaaatatcttcgtagaaaaactagacagaatgattctcagaaactcctttgtgatgtgtgtgttcaactcacgaagtttaacctttcttttcatagagcagttagtaaatactctgtttataaagtctgcaagtggatattcagacccctttgaggccttcgttggaaacgggatttcttcatattatgctagacagaagaattcccagtaacttccttgtgttgtgtgtgttcaactcacagagttgaactttcatttacacagagcagatttgaaaccctctttttgtggaatttgcaagtggagatttcaagggctttgaggccaaaggcagaaaaggaaatgtcttcgtttcaaaactagacagaatcattctcagaaactgctgcgtgatgtgtgcgttcaactctcagagtttaacttttcttttcattcagcggtttggaaacactctgtttgtaaagtctgcacgtggatattttgaccacttagaggccttcgttggaaacggaattttttcatgtaaggctagacagaagaattcccagtaacttccttgtgttgtgtacattcaactcacagagttgaacgttcctttagacagagcagatttgaaacactctttttgtgcaattggcaagtggagatttcaagcgctttaaggtcaatggcagaaaaggaaatatcttcgtttcaaaactagacagaatcattcccacaaactgcgttgtgatgtgttcgttcaactcacagagtttaacctttcttttcatagagcagttaggaaacagtctgtttgtaaattctgtaagtggatattctgacatcttgtggcattcgttggaaacgggatttcttcatattctgctagacagaagaattctcagtaacttccttgtgttgtgtgtattcaactcacagagttgcacgatcctttacacagagcagacttgaaacactctttttgtggaatttgcaagtggagatttcagccgctttgaggtcaatagtagaaaaggaaatatcttcgtagaaaaactacacagaatgattctcagaaaatcttttgtgatgtgtgcgttcaactcacagagtttaacttttcttctcatagagcagttaggaaacactctgtttgtaaagtctgcaagtggatattaagacctctttgaggccttcgttggaaacgggatttcttcatattatgctagacagaagaattctcagtaacttccttgtgttgtgtgtattcaactgacagagttgaactttcatttagagagagcagatttgaaacactgtttttgtggaatttgcaagtggagatttcaagcgctttcgggccaaaggcagaaaacgaaatatcttcgtataaaaactagacagaatcattcttagaaactgctgcgtgatgtgtgcgttcaactctcagagtttaacttttcttttcattcagcggtttggaaacactctgtttgtaatgtctgcacgtggatattttgaccacttagaggccttcgttggaaacgggttttttgcatgtaaggctagacagaagaattctcagtaacttccttgtgttgtgtgcattcaactcacagagttgaacgttcccttagacagagcagatttgaaacagcctatttttgcaatttgcaagtgtagatttcaagcgctttaaggtcaacggctgaaaaggaaatatcttcctttcaaaactagacagaatgattctcagaaactcctttgtgatgtgtgcgttcaactcacacagtttaacctttcttttcatagagcagttaggaaacactctgtttgtaaagtctgcaagtggatattcagacctccttgaggccttcattggaaacgggatttcttcatattatgctagacagaagaattctcagtaacttccttgtgttgtgtgtattcaactcacagagttgaacgatcctttacacagagcagacttgaaacactccttttgtggaatttgcaagtggagatttcagccgctttgaggtcaatggtagaataggaaatatcttcctatagaaagtagacagaatgattctcagaaactcctttgtgatgtgtgcgttcaactcacagagtttaacctttcttttcatagagcagttaggaaacactctgtttgtaaagtctgcaagtggatattcagacctctttgaggccttcgttggaaactgggtttttttcatataaggctagacagaagaattcccagtaacttccttgtgttgtgtgtgttcaactcacagagttgaactttcatttacacagagcagatttgaaacactctttttgtggaatttgcaagtggatatttcaagcgctttgaggccaaaggcagaaaaggaaatatcttcgtttcaaaactagacagaatcattctcagaaactgctgcgtgatgtgtgcgttcaactctcagagtttaacttttcttttcattcagcggtttggaaacactctgtttgtaaagtctgcacgtggaaattttgaccacttagaggccttcgttggaaacgggtttttttcatgtaaggatagacagaagaattcccagtaacttccttgtgttgtgtgcattcaactcacagagttgaacgttcccttagacagagcagatttgaaacactctatttgtgcaatttgcaagtgtagatttcaagcgctttaaggtcaacggcagaaaaggaaatatcttcgtttcaaaactagacagaatgattctcagaaactcctttgtgatgtgtgcgttcaactcacagagtttaacttttcttttcatagagcagttaggaaacactctgtttgtaaagtctgcaagtggatattcagacctctttgaactcttcgttggaaaagggatttcttcatattatgctagacagaatacttctcagtaacttccttgtgttgtgtgtattcaactcacagagttgaacgatcctttacagagagccgacttgaaacactctttttgtggaatttgcaagtggagatttcagccgctttgaggtcaatggtagaaaaggaaatattttcgtataaagactagacagaatgattctcagaaaatcctttgtgatgtgtgcgttcaactcacagagcttaacctttcttttcatagagcagttaggaaacactctgtttgtaaagtctgcaagtggatattcagacacctttgaggccttcgttggaaacgggatttcttcatgttctgctagacacaagaattctcagtaacttccttgtgttgtgtgtattcaactgacagagttgaacgatcctttacacagagcagacttgaaacactctttttgtggaatttgcaagtggagatttcaagcgcttcggggccaaaggcagaaaaggaaatatcttcgtataaaaactagacagaatcattctcagaaactgctgcgtgatgtgtgcgttcaactctcagagtttaacttttcttttcattcagcggtttggaaacactctgtttgtaaagtctgcacgtggaaattttgaccacttagaggccttcgttggaaacgggattttttcatgtaaggctagacagaagaattcccagtaacttccttgtgttgtgtacattcaactcacagagttgaacgttcccttagacagagcagatttgaaacactctttttgtgcaattggcaaatggagatttcaagcgctttaaggtcaatggcagaaaaggaaatatcttcgtttcaaaactagacagaatcattcccacaaactgcgttgtgatgtgttcgttcaactcacagagtttaacctttctgttcatagagcagttaggaaacactctgtttgtaaagtctgaaagtggatattctgacatcttgtggccttcgttggaaacgggatttcttcatattctgctagacagaagaattctcagtaacttccttgtgttgtgtgtattcaactcacagagttgaacgatcctttacacagagcagacttgaaacactctttttgtggaatttgcatgtggagatttcagccgctttgagttcaatggtagaatagaaaatatcttcctatagaaactagacagaatgattctcataaactcctttgtgatgtgtgcgttcaactcacagagtttaacctttcttttcatagagcagttaggaaacactctgtttgaaaagtctgcaagtggatattcagacctccttgaggccttcgttggaaacgggatttcttcatattctgctagacagaagaattctcagtaacttccttgtgttgtgtttattcaactcacagagttgaatgatcctttacacagagcagacttgaaacactctttttgtggaatttgcaagtggcgatttcagccgctttgaggtcaatgatagaaaagtaaatatcttcgtataaagactagacagaatcattctcagaaactgctctgcgatgtgtgcgttcaactctcagagtttaacttttcttttcattcagcagtttggaaacactctgtttgtaaagtctgcacgtggatattttgaccacttagaggccttcgttggaaacgggtttttttcctgtaaggctaaaaagaagaattcacagtaacttccttgtgttgtgtacattcaactcacagagttgaacgttcccttagacagagcagatttgaaacactctttttgtgcaattggcaagtggagatttcaagcgctttaaggtcaatggcagaaaaggaaatatcttcctttcaaaactagacagaatcattcccacaaactgcgttgtgatgtgttcgttcatctcacagagtttaacctttcttttcgtagagcagttaggaaacagtctgtttgtaaattctgtaagtggatattctgacatcttgtggccttcgttggaaacgggatttcttcatattctgctagacagaagaattctcagtaacttccttgtgttgtgtgtattcaactcacagagttgaacgatcctttacagagagcagactttaagcactctttttgtggaatttgcaagtggagatttcagccgctttgaggtcaatggtagaaaaggaaatatcttcgtataaagactagacagaatgattctcagaaactcctttgagatgtgtgtgttcaactcacagagtttaacctttcttttcatagagcagttaggaatcactctgtttgtaaagtctgcaagaggatattcagacctctttgaggcctttgttggaaacgggtttttttcatataaggctagacagaagaattctcagaaacttccttgtgttgtgtgtattcaactcacagagttgaacgatgctttacacagagtagacttgaaacactctttttctggaatttgcaagtggagatttcaggcgctttgaggtcaatggtagaaaaggaaatatcttcgtataaaaactagacagaatcattctcagaaactgctctgcgatgtgtgcgttcaactctcagagtttaacatttcttttcattcagcagtttggaaacactctgtttgtaaagtctgcacgtggataacttgaccacttagaggccttcgttggaaacgggtttttttcatgtaaggctagacagaagaattcccagtaacttccttgtgttgtgtgcattcaactcacagagttgaacgttcccttagacagagcaggatttgaaacactctatttgtgcaatttgcaagtgtagatttcaagcgctttaaggtcaatggcagaaaaggaaatatcttcgtttcaaaactagacagaatcattcccacaaactgcgttgtgatgtgttcgttcaactcacagactttaacctttctgttcatagagcagttaggaaacactctgtttgtaaagtctgcaagtggatattcagacctccttgaggccttcgttggaaacgggatttcttcatattctgctagacagaagaattctcagaaacttccttgtgttgtgtgttttcaactcacagagttgaacgatcctttacacagagcagacttgaaacactctttttgtggaatttgcaagtggagatttcagccgctttgaggtcaatggtaaaataggaaatatcttcctatagaaactagacagaatgattctcagaaacttctttgtgatgtgtgcgttcaactcacagagtttaacctttctgttcatagagcagttaggaaacactctgtttgtaaactctgcaagtggatattcagacctctttgaggccttcgttggaaacgggatttctccatactgtgctagacagaagaattcccagtaacttccttgtgttgtgtgtgttcgactcacagagttgaactttcatttacacagagcagatttgaaacactctttttgtggaatttgcaaatggagatttcaagcgctttgagtccaaaggcagaaaaggaaatatcttcgtataaaaactagacagaatcattctcagaaactgctctgcgatgtgtgcgttcaactctcagagtttaacttttcttttcattcagcagtttggaaacactctgtttgtaaagtctgcacgtggatattttgaccacttagaggccttcgttggaaacgggtttttttcctgtaaggctagacagaagaattcccagtaacttccttgtgttgtgtacattcaactcacagagttgaacgttcccttagacagagcagatttgaaacactctttttgtgcaattggcaagtggagatttcaagcgctttaaggtcaatggcagaaaaggaaatatcttcgtttcaaaactagacagaatcattcccacaaactgcgttgtgatgtgttcgttcaactcacagagtttaacctttcttttcatagagcagttaggaaacagtctgtttgtcaattctgtaagtggatattctgacatcttgtggccttcgatggaaacgggttttcttcatattctgctagacagaagaattctcagaaacttccttgtgttgtgtgtattcaactcacagagttgaacgatcgtttacacagagcagacttgagacactctttttgtggaatttgtaagtggagatttcagccgctttgaggtcaatggtagaaaaggaaatatcttcatataaaaactagacagaatgattctcagaaactcctttgtgatgtgtgtgttcaactcacagagtttaacctttctttccgtagagcagttaggaaacactctgtttgtaaagtctgcaagtggatattcagacctccttgaggccttcgttggaaatgggatttcttcatattctgctagacagaagaattcccagtaacttccttgtgttgtgtgtgttcaactcacagagttgaactttcatttacacagagcagatttgaaacactctttttgtggaatttgcaagtggagatttcaagcgctttgaggcgaaaggcagaaaaggaaatatcttcgtataaaaactagacagaatcattctcagaaactgctgcgtgacgtgtgccttcaactctcagagtttaacttttcttttcattcagcggtttggaaacactctgtttgtaaagtctgcacgtggatattttgaccacttagaggccttcgttggaaacgggattttttcatgtaaggctagacagaagaattcccagtaacttccttgtgttgtgtgcattcaactcacagagttgaacgttcccttagacagagcagatttgaaacactctatttgtgcaatttgcaagtgtagatttcaagcgctttaaggtcaatggcagaaaaggaaatatcttcgtttcaaaactagacagaatcattcccagaaactgcgttgtgatgtgttcgttcaactcacagagtttaacctttctgttcatagagcagttaggaaacactctgtttgtaaagtctgtaagtggatattctgacgtcttgtggccttcgttggaaacgggatttcttcatattctgctagacagaagaattctcagtaacttccttgtgttgtgtgtattcaactcacagagttgaacgatcatttacacaaagcagacttgaaacactctttatgtggaatttgcaagtggagatttcagccgctttgaggttaatggtagaaaatgaaatgtcttcgtatagaaactagacagaatgattctcagaaactcctttgtgatgtgtgcgttcaactcacagagtttaacctttcttttcatagagcagttaggaaacactctgtttgtaaagtctgcaagtggatattcagacctccttgaggccttcgttggaaacgggatttcttcctattatgctagacagaagaattcccagtaacttccttgtgttgtgtgtgttcaactcatagagttgaactttcatttacacagagcagatttgaaacactctttttgtggaatttgcaagtggagatttcaagcgctttgaggccaaaggcagaaaaggaaatatcttcgtataaaaactagacagaatcattctcagaaactgctgcgtgatgtgtgcgttcaactctcggagtttaacttttcttttcattcagcggtttggaaacactctgtttgtaaagtctgcacgtggatattttgaccacttagaggccttcgttggaaacgggtttttttcatgtaaggctagacagaagaattcccagtaacttccttgtgttgtgtgcattcaactcacagagttgaacgttcccttagacagagcagatttgaaacactctatttgtgcaatttgcaagtgtagatttcaagcgctttaaggtcaatggcagaaaaggaaatatcttcgtttcaaaactagacagaatgattctcagaaactcctttgtgatgtgtgcgttcaactcacagagtttaacttttcttttcatagagcagttaggaaactctctgtaaagtctgcaagtgcatattcagacctctttgaggccttcgttggaaacgggatttcttcatattatgctagacagaataattctcagtaacttccttatgttgtgtgtattcaactcacagagttgaacgatcctttacagagagcagacttgaaacactctttttgtggaattcgcaagtggagatttcagccgctttgaggtcaatggtagaaaaggatatatcttcgtataaagactagacagaatgattctcagaaactcctttgtgatgtgtgcgttcaactcacagagtttaacctttcttttcatagagcagttaggaaacactctgtttgtaaagtctgcaagttgatattcagacctctttgaggccttcgttggaaaggggatttcttcatattctgctagagagaagaattctcagtaacttcccttgtgttgtgtgtattcaactcacagagttgaacgatcctttacacagagaagacttgaaacactctttttgtggaatttgcaagtggagatttcagccgctttcaggtcaatagtagaaaaggaaatatcttcgtagaaaaactagacagaatcattctcagaaactgctctgcgatgtgtgcgttcaactctcagagtttaacttttcgtttcattcagcagtttggaaacactctgtttgtaaagtctgcacgtggatattttgaccacttagaggccttcgttggaaacgggtttttctcctgtaaggctagacagaagaattcccagtaacttccttgtgttgtgtacattcaactcacagagttgaacgttcccttagacagagcagatttgaaacactctttttgtgcatttggcaagtggagatttcaagcgctttgaggtcaatggcagaaaaggaaatatcttcgtttcaaaactagacagaatcattcccacaaactgcgttgtgatgtgttcgttcatctcacagagtttaacctttcttttcatagagcagttaggaaacactctgtttgtaaattctgtaagtggatattctgacatcttgtggccttcgttggaaacgggatttcttcatattctgctagacagaagaattctcagtaacttccttgtgttgtgtgtattcaactcacagagttgaacgatcctttacacagagcagacttgaaacactctttttctggaatttgcaagtggagatttcagccgctttgaggtcaatggtagaataggaaatatcttcttatagaaactagacagaatgattctcagaaacttcattgtgatgtgtgcgttcaactcacagagtttaacctttcttttcatagagcagttaggaaacactctgtttgtaaactctgcaagtggatattcagacctctttgaggccttcgttggaaaggggatttctccatactgtgctagacagaagaattcccagtaacttccttgtgttgtgtgtgttcaactcacagagttgaactttgatttacacagagcagatttgaaacactctttttgtggaatttgcaagtggagatttcaagcgctttgaggccaaaggcagaaaaggaaatatcttcgtataaaaactagacagaatcattctcagaagctgctctgcaatgtgtgcgttcaactctcagagtttaacttttcttttcattcagcagtttggaaacactctgtttgtaaagtctgcacgtggatattttgaccacttagaggccttcgttggaaacgggtttttttcctgtaaggctagacagaagaattcccagtaacttccttgtgttgtgtacattgaactcacagagttgaacgttcccttagacagagcagatttgaaacactctttttgtgcaattggcaagtggagatttcaagggctttaaggtcaatggcagaaaaggaaatatcttcgtttcaaaactagacagaatcattcccacaaactgcgttgtgatgtgttcgttcaactcacagagtttaacctttcttttcatagagcagttaggaaacagtctgtttgtaaattctgtaagtggatattctgacatcttgtggccttcgttggaaacgggatttcttcatattctgctagacagaagaattctcagtaacttccttgtggagttgtgtgtattcaactcacagagttgaacgatcctttacacagagcagacttgaaacattctttttctggaatttgcaagtggagatttcagccgctttgaggtcaatggtagaataggaaatatcttcctatagaaactagacagaatgattctcataaactcctttgtgatgtgtgcgttcaactcacagagtttaacctttcttttcatagagcagttaggaaacactctgtttgtaaagtctgcaagtggatattcagacctccttgaggccttcgttggaaacgggatttcttcatattctgctagacagaagaattctcagtaacttccttgtgttgtgtttattcaactcacagagttgaatgatcgtttacacagagcagacttgaaacactctttttgtggaatttgcaagtggagatttcagccgctttgaggtcaatggtagaaaagtaaatatcttcgtataaagactagacagaatgattctcagaaactccttagtgatgtgtgcgttcaactcacagagtttaacctttctgttcatagagcagttaggaaacactctgtttgtaaagtctgcaagtggatattcagacccctttgaggccttcgttggaaacgggatttcttcatattatgctagacagaagaattcccagtaacttccttgtgttgtgtacattcaactcacagagttgaacgttcccttagacagagcagatttgaaacactctttttgtgcaattggcaagtggagatttcaagcgctttaaggtcaatggcagaaaaggaaatatcttcgtttcaaaactagacagaatcattcccacaaactgcgttgtgatgtgttcgttcaactcacagagtttaacctttcttttcatagagcagttaggaaacactctgtttgtaaatgtctgcaagtggatattcagacctccttgaggccttcattggaaacgggatttcttcatattctgctagacagaagaattctcagtaacttccttgtgttgtgtgtattcaactcacagagttgaacgatcctttacacagagcagacttgaaacactctttttgtggaatttgcaagtggagatttcagccgctttgagttcaatggtagaataggaaatattttcctatagaaactagacagaatgattctcagaaattcctttgtgatgtgtgcgttcaactcacagagtttaacctttcttttcatagagcagttaggaaacactctgtttgtaaagtctgcaagtggatattcagacctccttgaggccttcgttggaaacgggatttcttcatattatgctagacagaagaattcccagtaacttccttgtgttgtgtgtgttcaactcacagagttgaacgttcattaacacagagcagatttgaaacactctttttgtggaatttgcaaatggagatttcaagcgctttggggccaaaggcagaaaaggtaatatcttcgtttcaaaactagacagaatcattctcagaaactgctctgcgatgtgtgcgttcaactctcagagtttaacttttcttttcattcagcagtttggaaacactctgtttgtaaagtctgcacgtggataatttgaccacttagaggccttcgttggaaacgggtttttttcatgtaaggctagacagaagaattctcagtaacttccttgtgttgtgtgtattcaactcacacagctgaacgatcctttacacagagcagacttgtaacactctttttgtggaatttgcaagtggagatttcagccgctttgaagtcaaaggtagaaaaggaaatatcttcctataaaaactagacagaatcattcccacaaactgcgttgtgatgtgttcgttcaactcacagagtttaacctttctgttcatagagcagttaggaaactctctgtttctaaagtctgtaagtggatattctgacatcttgtggccttcgttggaaacgcgatttcttcatattctgctagacagaagaattctcagaaacttccttctgttgtgtgttttcaactcacagagttgaacgatgctttacacagagtagacttgaaacactctttttgtgtaatttgcaagtggagatttcagccgctttgaggtcaatggtagaaaaggaaatatcttcgtataaaaacaagacagaacgattctcagaaactcctttgtgatgtctgcgttcaactcacagagtttaacctttcttttcatagagcagttaggaaacactctgtttgtaaagtctgcaagtggatattcagacctctttgaggccttcgttggaaacgggtttttttcatgtaaggctagacagaagaattcccagtaacttccttgtgttgtgtgtgttcaactcacagagttgaactttcatttacacagaccagatttgaaacactctttttgtggaatttgcaagtggagatttcaagcgctttgaggccaaaggcagaaaaggaaatatcttcgtataaaaactagacagaatcattctcagaaactgctctgcgatgtgtgcgttcaactctcagagtttaacttttcttttcattcagcagtttggaaacactctgtttgtaaagtctgcacgtggatattttgaccacttagaggccttcgttggaaacgggtttttttcctgtaaggctagacagaagaattcccagtaactttccttgtgttgtgtacattcaactcacagagttgaacgttcccttagacagagcagatttgaaacactctttttgtgcaattcgcaaatggagatttcaagcgctttaagttcaatggcagaaaaggaaatatcttcgtttcaaaactagacagaatcattcccacaaactgcgtattgatgtgttcgttcaactcacagagtttaacctttcttttcatagagcagttaggaaacactctgtttgtaaattctgtaagtggatattctgaaatcttgcggccttcgttggaaacgggctttcttcatattctgctagacagaataattctcagtaacttccttgtgttgtgtgtattcaactcacagagttgaaggatcctttacagagagcaggcttgaaacactctttttgtcgaatttgcaagtggagatttcagccgctttgaggtcaatggtagaataggaaatatcttcttatagaaactagacagaatgattctcagaaactcccttgtgatgtgtgcgttcaactcacagagtttaacctttcttttcatagagcagttaggaaacactctgtttgtaaactctgcaagtggatattcagacctctttgaggccttcgttggaaacgggatttcttcatattatgctagacagaagaattcccagtaacttccttgtgttgtgtgtgttcaactcacagagttgaactttcatttacacagagcagatttgaaacactctttttgtggaatttgcaagtggagatttcaagcgctttgaggccaaaggcagaaaaggaaatatcttcgtatgaaaactagacagaatcattctcagaaactgctctgcgatgtgtgcgttcaactctcagagtttaacttttcttttcattcagcagtttggaaacactctgtttgtaaagtctgcgcgtggataatttgaccacttagaggccttcgttggaaacgggtttttttcatataaggctagacagaagaattcccagtaacttccttgtgttgtgtgcattcaactcacagagttgaacgttcccttagacagagcagatttgaaacactctatttgtgcaatttgcaagtgtagttttcaagctctttaaggtcaacggcagaaaaggaaatatcttggtttcaaaactagacagaatcattcccacaaactgcgttgtgctgtgttcgttcaactcacagagtttaacctttctgttcatagagcagttaggaaacactctgtttgtaaagtctgtaagtggatattcagacatcttgtggccttcgttggaaacgggatttcttcatattctgctagacagaggaattcccagtaacttccttgtgttgtgtgcattcaactcacagagttgaatgattctttacacagagcagatttgagacactcttttggtggaatttgtaagtggagaattcagccgctttgaggtcaatggtagaaaaggaaatatcttcgtataaaaactagacagaatgattctcagaaactcctttgtgatgtgtgcgttcaactcacagagtttaacttttcttttcatagagcagttaggaaacactctgtttgtaaagtctgcaagtggatattcagacctctttgaggccttcgttggaaacgggatttcttcctattctgctagacagaagaattctcagtaacttccttgtgttgtgtgtattcaactcacagagttgaacgatcctttacacagagcagacttgaaacactctttttgtggaatttgcaagtggagatttcagccgctttcaggtcaatggtagaataggaaatatcttcatatagaaactagacagaatgattctcagaaactcctttgtgatgtgtgcgttccactcacacagtttaacctttcttttcatagagcagttaggaaacactctgtttgtaaagtctgcaagtggatattcagacctccttgaggcattcgttggaaacgggatttcttcatattatgctagacagaagaattcccagtaacttccttgtgttgtgtacattcaactcacagagttgaacgatcccttagacagagcagatttgaaacactctttttgtggaatttgcaaatggagatttcaagcgctttgaggccaaaggcagaaaaggaaatatcttcgtataaaaactagacagaaatgattctcagaaactcctttgtgatgtgtgcgttcaactcacagagtttaacctttcttttcatagagcagttaggaaacactctgtttgtaaagtctgcaagtggatattcagacctctttgaggccttcgttggaaacgggttttcttcatattctgctagacagaagaattctcagtaacttccttgtgttgtgtgtattcaactcacagagttgaacgatcctttacacagagcagtcttgaaacactctttttgtggaatttgcaagtggagatttcagccgctttgaggtcaatagtagaaaaggaaatatcttcgtagaaaaactaggcagaatgattctcagaaactcctttgtgatgtgtgcgttcaactcatagagtttaacctttcttttcatagagcagttaggaaacactctgtttgtaaagtctgcaagtggatattcagacctctttgaggccttcgttggaaacgggatttcttcatattctgctagacagaataattctcagtaacttccttgtgttgtgtgtattcaactcacagagttgaacgatcctttacagagagcagacttgaaacactctttttgtggaatttgcaagtggagatttcagccgctttgaggtcaatagtagaaaaggaaatatcttcgtagaaaaactagacagagtgattctcagaaactcctttgtgatgtctgcgttcaactcacagagtttaacctttcttttcatagagcagttaggaaacactctgtttgaaaagtctgcaagtggatattcagacctccttgaggccttcgttggaagcgggatttcttcatattctgctatacagaagaattctcagaaacttccttgtgttgtgtgtattcaactcacagagttgaacgatcgtttacacagagcagacttgagacactcttttttggaatttgtaagtggagatttcagccgctttgaggtcaatggtagaaaaggaaatatcttcacataaaaactagacagaatgattctcagaaactcctttgtgctgtgtgcgttcaactcacagagtttaacctttcttttcatagagcagttaggaaacactctgtttgttaagtctgcaggtggatattcagacctctttgaggccttcgttggaaacgggatttcttcatattatgctagacagaagaattctcagtaacttccttgtgttgtgtgtattcaactcacagagttgaacgatcctttacacagagcagacttgaaactctctttttgtggaatttgcaagtggagatttcagccgctttgaggtcaatagtagaaaaggaaatatctttcgtagaaaaactagacagaatgattctcagaaactcctttgggatgtgtgtgcccaactcacagagtttaacctttcttttcatagagctgttaggaaacactctgtttgtaaagtctgcaagaggatattcagacctctttgaggccttcgttggaaacgggtttttttcatataaggctagacagaagaattcccagtaacttccttgtgttgtgtgtgttcaactcacagagttgaactttgatttacacagagcagatttgaaacactctttttgtggaattttcaagtggagatttcaagcgctttgaggccaaaggcagaaaaggaaatatcttcgtataaaaactagacagaatcattctcagaaactgctgcgtgatgtgtgccttcaactctcagagtttaacttttcttttcattcagcggtttggaaacactctgtttgtaaagtctgcacgtggaaattttgaccacttagaggccttcgttggaaacgggtttttttcatgtaaggctagacagaagaattctcagtaacttccttgtgttgtgtgtattcaactcacagagttgaacgatcctttacacagagcagacttgaaacacactttttgtggaatttgcaagtggagatttcagccgctttgaggtcaatggtagaataggaaatatcttcttatagaaactagacagaatgatctcagaaactcctttgtgatgtgtgccttcaactcacagagtttaacctttcttttcatagagcagttaggaaacactctgtttgtaaagtctgcaagtggatattcagacctctttgaggccttcgttggaaacgggatttcttcatattctgctagacagaagaattctcagtaacttccttgtgttgtgtgtattcaactcacagagttgaacgatcctttacacagagcagacttgaaacactctttttgtggaatttgcaagtggagatttcagccgctttgaggtcagtagtagaaaaggaaatatcttcgtagaaaaactagacagaatgattctcagaaactcctttgtgatgtgggcgttgaactcacagagtttaacctttcttttcatagagcagttaggaaacactctgtttgtaaagtctgcaagtggatattcagacctctttgaggctttcgttggaaacgggatttcctcatattctgctagacagaagaattcccagtaacttccttgtgttgtgtgtgttcaactcacagagttgaactttcatttacacagagcagatttgaaacactctttttgtggaatttgcaaatggagatttcaagcgctttgaggccaaaggcagaaaaggaaatattctttgtataaaaactagacagaaccattctcagaaactgctctgcgatgtgtgcgttcaactctcagagtttaacttttcttttcattcagcagtttggaaacactctgtttgtaaagtctgcacgtggataatttgaccacttagaggccttcgttggaaacgggtttttttcatgtaaggctagacagaagaattcccagtaacttccttgtgttgtgtgcattcaactcacagagttgaacgttcccttagacagtgcagatttgaaacactctatttgtgcaatttgcaagtgtagatttcaagcgctttaaggtcaatggcagaaaaggaaatatcttcgtttcaaaactagacagaatgattctcagaaactcctttgtgatgtgtgcgttcaactcacagagttcaacctttcttttcatagagcagttaggaaacactctgtttgtaatgtctgcaagtggatcttcagacctctttgaggccttcgttggaaacgggttttcttcatattatgctagacagaagaattctcagtaacttccttgtgttgtgtgtattcaactcacagagttgaacgatcctttacacagagcagacttgaaacactctttttgtggaatttgcaagtggagatttcagccgctttgaggtcaatggtagaataggaaatatcttcctataaaaactagacagaatgattctcagaaaatcttttgtgatgtgtgcgttcaactcacagagtttaacttttcttctcatagagcagttaggaaacactctgtttgtaaagtctgcaagtggatattcagacctctttgaggtcttcgttggaaacgggatttcttcatattatgctagacagaagaattctcagtaacttccttgtgttgtgtgtattcaactgacagagttgaacttttatttagagagagcagatttgaaactctgtttttgtggaatttgcaagtggagatttcaagcgctttggggccaaaggcagaaaaggaaatatcttcgtataaaaactagacagaatcattctcagaaactgctgggtgatgtgtgcgttcaactctcagagtttaacttttcttttcattcagcggtttggaaacactctgtttgtaaagtctgcacgtggatattttgaccacttagaggccttcgttggaaacgggttttttgcatgtaaggctagacagaagaattcccagtaacttccttgtgttgtgtacattcaactcacagagttgaacgttcccttagacagagcagatttgaaacactctttttgtgcaattggcaagtggagatttcaagcgctttaaggtcaatggcagaaaaggaaatatcttcgtttcaaaattagacagaatgattctcagaaactcctttgtgatgtgtgcgttcaactcacagagttcaacctttcttttcatagagcagttgggaaacactctctttgtaaagtctgcaagtggatattcagacttctttgaggccttcgttggaagcgggatttcttcatattctgctagacagaagaattctcagtaacttccttgtgttgtgtgtattcaactcacagagttgaacgatcctttacacagagcagacttgaaacactctttttgtggaatttgcaagtggagatttcagccgctttgaggtcaatggtagaataggaaatatcttcctatagaaactagccagaatgattctcagaaactcctttgtgatttgggtgttcaactcacagagtgtaacctttcttttcatagagcagttaggaaacactctgtttgtaaagtctgcaagtggatatttttacctctttgaggccttcgttggaaacgggtttttttcatgtaaggctagacagaagaattctcagtaacttccttgtgttgtgtgtattcaactgacagagttgaactttcatttagagagagcagatttgaaacactctttttttggaatttgcaagtggagatttcaagcgctttgaggccaaaggcagaaaaggaaatatcttcgtataaaaactagacagaatcattctcagaaactgctctgcgatgtgtgcgttcagatctcagagtttaacttttcttttcattcagcagtttggaaacactctgtttgtaaagtctgcacgtggatattttgaccacttagaggccttcgttggaaacgggattttgtcatgtaaggctagacagaagaattcccagtaacttccttgtgttgtgtacattcaactcacagagttgaacgttcccttatacagagcagatttgaaacactctttttgtgaaattggcaagtggagatatcaagcgctgaaggtcaatggcagaaaaggaaatatcttcgtttcaaaactagacagaatcattcccacaaactgcgttgtgatgtgttcgttcaactcacagagtttaacctttcttttcatagagcagttaggaaacagtctgtttgtcaattctgtaagtggatattctgacatcttgtggccttcgttggaaacgggattttttcatattctgctagacagaagaattctcagtaacttccttgtgttgtgtgtattcaactcacagagttgaacgatcctttacagagagcagacttgaaacactctttttgtggaatttgcaagtggagatttcagccgctttgaggtcaatggtagaataggaattatcttcctatagaaactagacagaatgattctcagaaactcctttgtgatgtgtgcgttgaactcacagagtttaaccttgcttttcatagagcagttaggaaacactctgtttgtaatgtctgcaagtggatattcagacctccttgaggccttcgttggaaaagggatttcttcatattatgctagacagaagaattctcagaaacttccttgtgttgtgtgttttcaactcacagagttgaacgatcctgtacacagagcagacttgaaacactctttttgtggaatttgcaagtggagatttcagccgctttgaggtcaatggtagaataggaaatatcttcctatagaaactagacagaatcattctcagaaactgctctgcgatgtgtgcgttcaactctcagagtttaacttttcttttcattcagcagtttggaaacactctgtttgtaaagtctgcacgtggatattttgaccacttagaggccttcgttggaaacgggtttttttcctgtaaggctagacagaagaattctcagtaacttccttgtgttgtgtacattcagctcacagagttgaacgttcccttagacagagcagatttgaaacactctttttgtgcaattggcaagtggtgatttcagccgctttgaggtcaatggtagaaaaggaaatatcttcgtataaaaactagacagaatcattcccacaaactgcgttgtgatgtgttcgttcaactcacagagtttaacctttcttttcatagagcagttaggaaacagtctatttgaaaattctgtaagtggatattctgacatcttgtggccttcgttggaaacgggatttcttcatattctgctagacagaagaattctcactaacttccttgtgttgtgtgtattcaactcacagagttgaacgatcctttacacagagcggacttgaaacactcattttgtggaatttgcaagtggagatttcagccgcgttgaggtcaatggtagaaaaggaaatatcttcgtataaaaactagacagaatgattctcagaaactcctttgtgatgtgtgtgttcaactcacagagtttcacctttcttttcatagagcagataggaaacactctgtttgtaaagtctgcaagtggatattcacacctctttgaggccttcgttggaaacgggtttttttcatataaggctagacagaagaattcccagtaacttcccttgtgttgtgtgtgttcaactcacagagttgaactttcatttacacagagcagatttgaaacactctttttgtggaatttgcaaatggagatttcaagcgctttgaggccaaaggcagaaaaggaaatatcttcgtttcaaaactagacagaatcattctcagaaactgctctgcgatgtgtgcgttcaactctcagagtttaacttttcttttcattcagcagtttggaaacactctgtttgtaaagtctgcacgtggatattttgaccacttagaggccttcgttggaaacgggttttttcctgtaaggctagacagaagaattcccagtaacttccttgtgttgtgtacattcaactcacagagttgaacgttcccttagaaagagcagatttgaaacactctttttgtgcaattggcaagtggagatttcaagcgatttaaggtcaatggcagaaaaggaaatatcttcgtttcaaaactagacagaatgattctcagaaactcctttgtgatgtgtgcgttcaactcacagagtttaacctttctgttcatagagcagttaggaaacactctgtttgtaaagtctgcaagtggatattcagacctctttgaggccttcgttttaaacgggatttcttcatattatgctagacagaataattctcagtaacttccttgtgttgtgtgtattcaactcacagagttgaacgatcctttacacagagcagacttgaaacactctatttgtagaatttgcaagtggagatttcagccgctttgaggtcaatagtagaaaaggaaatatcttcgtagaaaaactagacagaatgattctcagaaactcctttgtgatgtgtgcattcaactcacagagtttaacctttcttttcatagagcagttaggaaacactctgtttgtaaagtctgcaactggatattcagacctctttgaggccttcgttggaaacgggatttcttcatattatgctagacagaagaattctcagtaaattccttgttttgtgtgtattcaactcacagagttggacgatcctttacacagagcaaacttgaaacactctttttgtggaatttgcaattggagatttcagccgctttgaggtcaattgtagaaaaggaaatatcttcgtataaaaactagacagaatgattctcagaaactcccttgtgatgtgcgcgttcaactcacagagtttaacctttcttttcatagagcagttaggaaacactcagtttgtaaagtctgcaagtggatattcagacctccttgaggccttcgttggaaacgggatttcttcatattatgctagacagaagaattcccagtaacttccttgtgttgtgtacattcaactcacagagttgaacgttcccttagacagagcagatttgaaacactctttttgtgcaattggcaaatggagatttcaagcgctttaaggtcaatggcaggaaaggaaatatcttcgtttcaaaactagacagaatcattcccacaaactgcgttgtcatgtgttcgttcaactcacagagtttaacctttcttttcatagagcagttaggaaacagtctgtttgtaaattctgtaagtggatattctgacatcttgtggccttcgttggtaacgggatttcttcatattctgctagacagaataattctcagtaacttccttgtgttgtgtgtattcaactcacagatttgaaggatcctttacagagagcaggcttgaaacactcttcttctcgaatttgcaagtggagatttcagccgctttgaggtcaatggtagaaaagtaaatatcttcgtataaagacgagacagaattattctcagaaactcctttgtgatgtgtgcgttcaactcacagagtttaacctttcttttcatagagcagttaggaaacactctgtttgtaaagtctgcaagtggatattcagacatctttgaggctttcgttgaaaacgggatttcttcatattatgctagacagaagaattcccagtaacttccttgtgttgtgtgtgttcaactcacagagatgaactctcatttacacagagcagatttgaaactctctttttgtggaatttgcaaatggagatttcaagcgctttgaggccaaaggcagaaaaggaaatatcttcgtataaaaactagacagaatcattctcagaaactgctgcgtgatgtgtgcgttcaactctcagagtttaacttttcttttcattcagcggtttggaaacactctgtttgtaaagtctgcacgtggaaattttgaccacatagaggccttcgttggaaacgggtttttttcatgtaaggctagacagaagaattcccagtaacttccttgtgttgtgtgcattcaactcacagagttgaacgttcccttagacagagcagatttgaaacactctatttgtgcaatttgcaagtgtagatttcaagcgctttaaggtcaatggcagaaaaggaaatatcttcgtttcaaaactagacagaatgattctcagaaactccttcgtgatgtgtgcgttcaactcacagagtttaacctttcttttcatagagcagttaggaaacactctgtttgtaaagtctgcaagtggatattcagacctctttgaggccttcgttggaaacgggatttcttcatattctgctagacagaagaattctcagtaacttccttgtgttgtgtgtattcaactcacagagttgaacgatcctttacacagagcagacttgaaacactctttttgtggaatttgcaagtggagatttctgccgctttgaggtcaatggtagaataggaaatatcttcctatagaaactagacagaatgattctcagaaacttctttgtgatgtgtgtgttcaactcacagtgtttaacctttcttttcatagagcagttaggaaacactgtgtttttaaactctgcaagtggatattcagacctctttgaggccttcgttggaaacgggtttcttcatactgtgctagacagaagaattctcagtaacttaccttgtgttgtgtgtattcaactcacagagttgaacgatcctttacacagagcagacttgtaacactctttttgtggaatttgcaagttgagatttcagccgctttgaagtcaaagatagaaaaggaaatatcttcctataaaaactagacagaatgattctcagaaactcctttgtgatgtgtgcgttcaactcacagagtttaacttttcttttcatagagcagttaggaaacactctgtttgtaaagtctgcaagtggatattcagacctctttgaggccttcgttggaaacgggatttattcatattctgctagacagaagaattcccagtaacttccttgtgttgtgtgcattcaactcacagagttgaacgttcccttagacagaggagatttgaaacactctatttgtgcaatttgcaagtgtagatttcaagcgctttaaggtcaatggcagaaaaggaaatatcttcgtttcaaagctagacagaatcattcccacaaactgcgttgtgatgtgttcgttcaactcacagagtttaacctttctgttcatagagcagttaggaaacactctgtttgtaaagtctgcaagtggatattcagacctccttgaggccttcgttggaaactggatttcttcatattctgctagacagaagaattctcagtgacttccttgtgttgtgtgtattcaactcacagagttgaacgatcctttacacagagcagacttgaaacactctttttgtggaatttgcaagtggagatttcagccgctttgaggtcaatggtagaataggaaatatcttcctatagaaactagacagaatgattctcagaaactcctttgtgatgtgtgtgttcaactcacagagtttaacctttcttttcatagagcagttaggaaacactctgtttgtaaagactgcaagtggatattcaggcctctttgaggccttcgttggaaacgggtttttttcatataaggctagacagaagaattctcagtaacttcccttgtgttgtgtgtattcaactgacagagttgaactttcatttggagagagcagatttgaaacactgtttttgtggaatttgcaagtggagatttcaagcgctttgcggccaaaggctgaaaaggaaatatcctcgtataaaaacaagacagaatcattctcagaaactgctctgtgatgtgtgcgttcaactctcagagtttaacttttcttttcattcagcagtttggaaacactctgtttgtaaagtctgcacgtggataacttgaccacttagaggccttcgttggaaacgggtttttttcatgtaaggctagacagaagaattcccagtaacttccttgtgttgtgtacattcaactcacagagttgaacgttcccatagacagagcagatttgaaacactctttttgtgcaattggcaagtggagatttcaagcgctttaaggtcaatggcagaaaaggaaatatcttcgtttcaaaactagacagaatcattcccacaaactgcgttgtgatgtgttcgttcaactcacagagtttaacctttcttttcatagagcagttaggaaacagtctgtttgtaaattctgtaagtggatattctgacatcttgtggccttcgttggaaacgggatttcttcatattctgctagacagaagaattctcagtaacttccttgtgttgtgtttattcaactcacagagttgaacgatcctttacacagagcagacttgaaacactctttttcttgaatttgcaagtggagatttcagccgctttgaggtcaatggtagaaaaggaaatatcttcgtataaagactagacagaatgattctcagaaacttcattgtgacgtgtgcgttcaactcacagagtttaacctttcttttcatagagcagttaggaaacactctgtttgtaaagtctgcaagtggatattcagacctctctgaggccttcgttggaaacgggatttcttcatactgtgctagacagaagaattctcagtaacttccttgtgttgtgtgtattcaactcacagagttgaacgatcctttacacagagcagacttgaaccattctttttgtggaatttgcaagtggagatttcagccgctttgaggtcaatggtagaataggaaatatcttcctatagaaactagacagaatcattctcagaaactgctctgcgatgtgtgcgttcaactctcagagtttaacttttcttttcattcagcagtttggaaacactctgtttgtaaagtctgcacgtggatattttgaccacttagaggccttcgttggaaacgggtttttttcctgtaaggctagacagaagaattcccagtaacttccttgcgttgtgtacattcaactcacagagttgaacgttcccttagacagagcagatttgaaacactctttttgtgcaattggcaagtggagatttcaagcgctttaaggtcaatggcagaaaaggaaatatcttcgtttcaaaactagacagaaatcattcccacaaactgcgttgtgatgtgttcgttcatctcacagagtttaacctttcttttcgtagagcagttaggaaacagtctgtttgtaaattctgtaagtggatattctgacatcttgtggccttcgttggaaacgggatttcttcatattctgctagacagaagaattctcagaatcttccttgtgttgtgtgtattcaactcacacagttgaacgattgtttacacagagcagatttgaaacactctttctgtggaatttgcaagtggagatttcagccgctttgaggtcaatggtagaaaaggaaatatcttcgtataaaaaactagacagaatgattctcagaaactcctgtgtgatgtgtgcgttcaactcacagagtttaacctttcttttcatagagcagttaggaaacactctgtttgtaaagtctgcaagtggatattcagacctctttgaggccttcgtgggaaacgggtttttttcatataaggctagacagaagaattcccagtaacttccttgtgttgtgtgtgttcaactcacagagttgaactttcatttacacagagcagatttgaaacactctttttgtggaatttgcaagtggagatttcaagcgctttgaggccaaaggcagaaaaggaaatatcttcttttgaaaactagacagaatcattctcagaaactgctctgcgatgtgtgcgttcaactctcagagtttaacttttcttttcattcagcagtttggaaacactctgtttgtaaagtctgcacgtggatattttgaccacttagaggccttcgttggaaacgggtttttttcctgtaaggctagacagaagaattcccagtaacttccttgtgttgtgtgcattcaactcacagagttgaacgttcccttagacagagcagatttgaaacactctatttgtgcaatttgcaagtgtagatttcaagcgcattaaggtcaatggcagaaaaggaaatatcttcgtttcaaaattagacagaatcattcccacaaactgcgttgtgatgtgttcgttcaactcacagagttttacctttctgttcatagagcagttaggaaacactctgtaaagtctgtaagtggatattctgacatcttgtggccttcgttggaaacgggatttcttcatattctgctagacagaagaattcccagtaacttccttgtgttgtgtgtgttcaactcacagagttgaactttcatttacacagagcagatttgaaacactctttttgtgcaattggcaagtggtgatttcagccgctttgaggtcaatggtagaaaaggaaatatcttcgtataaaaactagacagaatgattctcagaaactcctttgtgatgtgtgcgttcaactcacagagtttaacctttcttttcatagagcagttaggaaacactctgtttgtaaagtctgcaagtggatattcagacctctttgaggccttcgttggaaacgggttttattcatataaggctagacagaagaattcccagtaacttccttgtgttgtgtgtgttcaactcacagagttgaactttcatttacacagagcagatttgaaacactctttttgtggaatttgcaggtggagatttcaagcgctttgaggccaaaggcagagaaggaaatatcttcgtataaaacctagacagaatcattctcagaaactgctgcgtgatgtgtgcgttcaactctcagagtttaacttttcttttcattcagcggtttggaaacactctgtttgtaaagtctgcacgtggatattttgaccacttagaggccttcgttggaaacgggttttttttcatgtaaggctagacagaagaattctcagtaacttccttgtgttgtgtgtattcaactcacagagttgcacgatcctttacacagagcagacttgaaacactctttttgtggaatttgcaagtggagatttcagccactttgaggtcaatggtagaataggaaatatcttcctatagaaactagacagaatgattctcagaaactcctttgtgatgtgtgcgttcaactcacagaatttaacatttcttttcatagagcagttaggaaacactctgtttgtaaagtctgtaagtggatattcagacctctttgaggccttcgttggaaacgggatttcttcgtattctgctagacagaagaattctcagtaacttccttgtgttgtgtgtattcaactcacagagttgaacgatcctttacagagagcagacttgaaacactctttttgtggaatttgcaagtggagatttcagccgctttgaggtcaatggtagaataggaaatatcttcgtagaaaaactagacagaatgattctcagaaactcccttgtgatgtgtgcgttcaactcacagagtttaacctttcttttcatagagcagttaggaaacactctgtttgtaaagtctgcaagtggatattcagacctccttgaggccttcgttggaaacgggatttcttcatattatgctagacagaagaattctcagtaccttccttgtgttgtgtgtattcaactcacagagttgaacgatcctttacacagagcatacttgaaacactcttgttgtggaatttgcaagtggagatttcagccgctttgaggtcaatggtagaataggaaatatcttcctatagaaactagacagaatgattctcagaaactcctttgtgatgtgtgcgttgaactcacagggtttaacctttcttttcatagagcagttaggaaacactctctttgtaaagtctggaagtggatattcagacctccttgaggccttcgttggaaacgggatttcttcatattatgctagacagaagaattcccagtaacttccttgtgttgtgtacattcaactcacggagttgaacgttcccttagacagagcagatttgaaacactctttttgtgcaattggcaaatggagatttcaagcgctttaaggtcaatggcagaaaaggaaatatcttcgtttcaaaactagacagaatcattcccacaaactgcgttgtgatgtgttcgttcaactcacagagtttaacctttcttttcatagaacagttaggaaacagtctgtttgtaaattctgtaagtggatattctgatatcttttggccttcgttggaaacgggatttcttcatattctgctagacagaagaattctcagtaacttccttgtgttgtgtgtattcaactcacagagttgaacgatcctttacacagagcagacttgaaacactctttttgtggaatttgcaagtggagatttcagccgctttgaggtcaatggtagaaaaggaaatatcttcgtataaagactagacagaatgattctgagaaactcctttctgatgtgtgcgttcaactcacagagtttaacctttcttttcatagagcagttaggaaacactctgtttgtaaagtctgcaagtggatattcagacctccttgaggccttcgttggaaacgggatttcttcatattatgctagacagaagaattcccagtaacttccttgtgttgtgtgtgttcatctcacagagttgaactttcatttacacagagcagatttgaaacactctttttgtggaatttgcaggtggagatttcaagcgctttgaggccaaaggcagaaaaggaaatatcttcgtataaaaactagacagaatcattctcagaaactgctctgcgatgtgtgcgttcaactctcagagtttaacttttcttttcattcagcagtttggaaacactctgtttgtaaagtctgcacgtggatattttgaccacttagaggccttcgttggaaacgggtttttttcctgtaaggctagacagaagaattcccagtaacttccttgtgttgtgtacattcaactcacagagttgaacgtttccttagacagagcagatttgaaacactctttttgtgcaattggcaagtggagatttcaagcgctttgaggtcaatggcagaaaaggaaatatcttcgtttcaaaactagacaaaatcattcccacaaactgcgttctgatgtgttcgttcaactcacagagtttaacctttctgttcatagagcagttaggaaacactctgtttgtaaagtctgtaagtggatattctgacatcttgtggccttcgttggaaacgggatttcttcatattctgctagacagaagaattctcagtaacttccgcgtgttgtgtgtattcaactcacagagctgaacgatcctttacacagagtagacttgaaacactctttttgtggaatttgcaagtggagatttcagccgctttgaggtcaatggtagaaaaggaaatatcttcctataaaaactagacagaatgattctcagaaactcctttgtgatgtgtgcgttcaactcacagagtttaacctttcttttcatagcgcagttgggaaacacactgtttgtaaagtctgcaagtggatattcagacatccttgaggctttcgttggaaacgggatttcttcatattctgctagaaagaagaattctcagtaacttccttgtgttgtgtgtattcaactcacagagttgaacgatcctttacagagagcagacttgaaacactctttttgtggaatttgcaagtggagatttcagccgcttttctggtcaatggtagaataggaaatatcttccaatagaaactagacagaatgattctcagaaactcctttgtgatgtgtgcgttcaactcacagagtttaacttttcttttcatagagcagtaaggaaacactctgtttgtaaagtctgcaagtggatattcagacctctttgaggccttcgttggaaacgggatttcttcatattctgctagacagaagaattcccagtaacttccttgtgttgtgtgcattcaactcacagagttgaacgttcccttagacagagaagatttgaaacactctatttgtgcaatttgcaagtgtagatttcaagcgctttaaggtcaacggcagaaaaggaaatatcttcgtttcaaaaccagacagaatcattcccacaaactgcgttgtgatgggttcgttcaactcacagagtttaacctttccgttcatagagcagttaggaaacacactgtttgtaaagtctgtaagtggatattctgacatcttgtggccctcgttggaaacgggatttcttcatattctgctagacagaagaattctcagaatcttccttgtgttgtgtgtattcaactcacagagttgaacgatcctttacacagagcagacttgaaacactctttttgtggaatttgcaagtggagatttcagccgctttgaggtcccatggtagaaaaggaaatatcttcgtataaaaactagacagaatgattctcagaaacttctttgtgatgtgtgtgttcaactgacagagtttaacctttcttttcatagagcagttaggaaacactctgtttgtaaactctgcaagtggatattcagacctctttgaggccttcgttggaaacgggttttgttcatataaggctagacagaataattctcagtaacttccttgtgttgtgtttattcaactcacagagttgaatgatcctttacagagagcagacttgaaacactctttttgtggaatttgcaagtggagatttcagccgctttgaggtcaatggtagaaaagtaaatatcttcgtataaagactagacagaatcattctcagaaactgctctgcgatgtgtgcgttcaactctcagagtttaacttttcttttcattcagcagtttggaaacactctgtttgtaaagtctgcacgtggataatttgaccacttagaggccttcgttggaaacgggtttttttcatgtaaggctagacagaagaattcccagtaacttcattgtgttgtgtacattctactcacagagttgaacgttcccttagacagagcagatttgaaacactctttttgtgcaattggcaagtggtgatttcaaccgctttgaggtcaatggtagaaagggaaatatcttcgtattaaaactagacagaatcattcccacaaactgcgttgtgatgtgttcgttcaactcacagagtttaacctttctgttcatagagcagttaggaaaaactctgtttgtaaagtctgtaagtagatattctgacatcttgtggccttctttggaaacgggatttcttcatattctgctagacagaagaattctcagtaacttaccttgtgttgtgtgtattcaactcacagagttgaacgatcctttacacagagcagacttgaaacactctttttgtggaattttgcaagtggagatttcagccgctttgaggtcaatggtagaaaaggaaactatcttcatataaagactagacagaatgattctcaggaactcctttgtgatgtgtgagttcaactcacagagtttatcctttcttttcatagagcagttaggaaacactctgtttgtaaagtctgcaagtggatattcagacctctttgaggccttcgttggaaacgggatttcttcatattctgctagacagaagaattctcagtaacttccttgtgttgtgtgtattcaactgacagagttgaactttcatttggagagagcagatttgaaacactgtttttgtggaatttgcaagtggagatttcaagcgcttttgggccaaaggcagaaaaggaaatatcttcgtataaaaactagacagaatcattctcagaaactgctctgcgatgtgtgcgttcaactctcagagtttaacttttcttttcattcagcagtttggaaacactctgtttgtaaagtctgcacttggatattttgaccacttagaggccttcgttggaaacgggtttttttcctgtaaggctagacagaagaattcccagtaacttccttgtgttgtgtgcattcaactcacagagttgaacgttcccttagacagagcagatttgaaacactctatttgtgcaattggcaactgtagatttcaagcgtttaaggtcaatggcagaaaaggaaatatcttcgtttcaaaactagacagaatcattcccacaaactgcgttgtgatgtgttcgttcaactcacagagtttaacctttctgttcatagagcagttaggaaacactctgtttgtaaagtctgtaagtggatattctgacatcttgtggccttcgttggaaacgggatttcttcatattctgctagacagaaagaattctcagtaacttccttgtgttgtgtgtattcaactcacagtgttgaacgatcctttacacagagcatacttgaaacactctttttgtggaatttgcaagtggagatttcagccgctttgatgtcaatggtagaaaaggaaataacttcgtataaagactagacagatgattctcagaaactcctttgtgatgtgtgcgttcaactcacagagtttaacctttcttttcatagagcagttaggaaacactctgtttgtaaaagtctgcaagtggatattcagacctctttgaggccttcgttggaaacgggtttttttcatataaggctagacagaagaattctcagtaacttccttgtgttgtgtgtattcagctgacagagttgaactttcatttagagagagcagatttgaaacactgtttttgtggaatttgcaagtggagatttcaagcgctttggggccaaaggcagaaaaggaaatatcttcgtataaaaactagacagaatcattctcagaaactgctctgctgatgtgtgcgttcaactctcagagtttaacttttcttttcattcagcagtttggaaacactctgtttgtaaagtctgcacgtggatattttgaccatttagaggctttcgttggaaacgggtttttttcttgtaaggctagacagaagaattcccagtaacttccttgtgttgtgtgcaatcaaatcacagagttgaacgttcccttagacagagtagatttgaaacactctatttgtgcaatttgcaagtgtagatttcaagcgctttaaggtcaaaggcagaaaaggaaatatcttcgtttcaaaactagacagaatgattctcagaaacttctttgtgatgtgtgcgttcaactcagagagtttaacatttcttttcatagagcagttaggaaacactctgtttgtaaactctgcaagtggatattcagacctcttcgaggtcttcgttggaaacgggatttcttcatactgtgctagacagaagaattctcagtaacttccttgtgttgtgtgtattcaactcacagagttgaacgatcctttacacagagcagacttggaacactctttttgtggaatttgcaagtggagatttcagccgcgttgaggtcaatggtagaaaaggaaatatcttcgtataaaaactagacagaatgattctcagaaactcctttgtgatgtgtgcgttcaactcacagagtttaacctttctgttcatagagcagttaggaaacactctgtttgtaaagtctgcaagtggatattcagatcctccttgaggccttcgttggaaacgggatttcttcatattctgctagacagaagaattctcagtaacttccttgtgttgtgtgtattcaactgacagagttgaactttcatttagagagagcagatttgaaacactgtttttgtggaatttgcaagtggagatttcaagcgctttgggcccaaaggcagaaaaggaaatatcttcgtataaaaactagacagaatcattctcagaaactgctctgcgatgtgtgcgttcaactctcagagtttaacttttcttttcattcagcagtttggaaacactctgtttgtaaagtctgcacgtggatattttgaccacttagaggccttcgttggaaacgggtttttttcctgtaaggctagacagaagaattcccagtaacttccttgtgttgtgtacattcaactcacagagttgaaccgttcccttagacagagcagatttgaaacactctttttgtgcaattggcaagtggagatttcaagcgctttgaggtcaatggcagaaaaggaaatatcttcgtttcaaaactagacagaatgattctcagaaactcctttgtgatgtgtgcgttcaactcacagagtttaacctttcttttcatagagcagttaggaaacactctgtttgtaaagtctgcaagtggatattcagacatctttgaggctttcgttggaaacgggatttcttcatattctgttagacagaagaattctcagaaacttcgttgtgttgtgtgttttcaactcacagagttcaacgatcctttacacagagtagatttgaaacactctttttgtggaattggcagggtggagatttcagccgctttgaggtcaatggtagaaaaggaaatatcttcgtataaaaactagacagagtgattctcagaaactcctttgtgatgtctgcgtttaactcacagagtttaacctttcttttcatagagcagttaggaaacactctgtttgtaaagtgtgcaagtggatattcagacctccttgaggccttcgttggaaacgggatttcttcatattctgctatacagaagaattcccagtaacttccttgtgttgtgtgtgttcaactcacagagttgaactttcatttacacagagcagatttgaaacactctttttgtggaatttgcaaatggagatttcaagcgctttgaggccaaaggcagaaaaggaaatatcttcgtataaaaactagacagaatcattctcagaaactgctctgcgatgtgtgcgttcaactctcagagtttaacttttcttttcatttagcagtttggaaacactctgtttgtaaagtctgcacgtggatattttgaccacttagaggcctacgttggaaacgggtttttttcctgtaaggctagacagaagaattcccagtaacttccttgtgttgtgtacattcaactcacagagttgaacgttcccttagacagagcagatttgaaacactctttttgtgcaattggcaaatggagatttcaagcgctttaaggtcaatggcagaaaaggaaatatcttcgtttcaaaactagacagaatcattcccacaaactgcgttgtgatgtgttcgttcaactcacagcagtttaacctttctgttcatagagcagttaggaaacactctgtttgtaaagtctgtaagtgcatattctgacatcttgtggccttcgttggaaacgggatttcttcatattctgctagacagaagaattctcagtaacttccttgtgttgtgtgtattcaactcacagagttgaacgatcctttacacagagcagacttgaaacactctttttgtggaatttgcaagtggagatttcagccgctttgatgtcaatggtagaaaaggaaatatcttcgtataaagactagacagaatgattctcagaaactcttttgtgatgtgtgcgttcaactcacagagtttaacctttcttttcatagagcagttaggaaacactctgtttgtaaagtctgcaagtggatattcagacctctttgaggccttcgttggaaacgggatttcttcatattctgctagacagaagaattctcagtaactaccttgtgttgtgtgtattcacctgacagagttgaacattcatttagagagagcagatttgaaacactgtttttgtggaatttgcaagtggagatttcaagaggtttggggccaaaggcagaaaaggaaatatcttcgtataaaaactagacagaatcattctcagaaactgctctgcgatgtgtgcgttcaactctcagagtttaacttttcttttcattcagcagtttggaaacactctgtttgtaaagtctgcacgtggatattttgaccacttagaggccttcgttggaaacgggctttttcctgtaaggctagacagaagaattcccagtaacttccttgtgttgtgtacattcaactcacagagttgaacgttcccttagacagagcagatttgaaacactctttttgtgcaattggcaaatggagatttcaagcgctttaaggtcaatggcagaaaaggaaatatcatcgtttcaaaactagacagaatgattctcagaaactcctttgggatgtgcgcgttcaactcacagagtttaacctttcttttcatagagcagttaggaaacactctgtttgtaaagtctgcaagtggatattcagacatccttgaggctttcgttggaaacgggatttcttcatattctgctagaaagaagaattctcagtaacttccttgtgttgtgtgtattcaactcacagagttgaacgatcctttacacagagcagacttgaaacactctttttgtgtaatttgcaagtggagatttcagccgctttgagttcaatggtagaataggaaatatcttcctatagaaactagacagaatgattctcagaaactcctttgtgatgtgtgcgttcaactcacagagttcaacctttcttttcatagagcagttgggaaacactctgtttgtaaagtctgcaagtggatattcagacttctttgaggccttcgttggaagcgggatttcttcatgttctgctagagagaagaattctcagaaacttccttgtgttgtgtgttttcaactcacagagttgaacgatcctttacacagagcagacttgaaacactctttttgtggaatttgcaagtggagatttcagcctctttgaggtcaatggtagaataggaaatatcttcctatagaaactagacagaatcattctcagaaactgctctgcgatgtgtgcgttcaactctcagagtttaacttttcttttcattcagcagtttggaaacactctgtttgtaaagtctgcacgtggatattttgaccatttagaggccttcgttggaaacgggtttttttcttgtaaggctagacagaagaattcccagtaacttccttgtgttgtgtgcattcaactcacagagttgaacgttcccttagacagagcagatttgaaacactctatttgtgcaatttgcaagtgtagatttcaagcgctttaaggtcaacggcagaaaaggaaatatcttcgtttcaaaactagacagaatcattcccacaaactgcgttgtgatgtgttcgttcaactcacagagtttaacctttctgttcatagagcagttaggaaacactctgtttgtaaagtctgcaagtggatattcagacctccttgaggccttcgttggaaacgggatttcctcatattctgctagacagaataattgtcagtaacttccttgtgttgtgtgtattcaactcacagagttgaacgatcctttacagagagcacacttgaaacactctttttgtggaatttgcaagtggagatttcagccgctttgaggtcaatggtagaataggaaatatcttcctatagaaactagacagaatgattctcagaaagtcctttgtgatgtgtgtgttcaaatcacagagtttaacctttcttttcatagagcagttagtaaacactctgtttataaagtctgcaagtggataatcagacccctttgaggccttcgttggaaacgggatttcctcatattatgctagacagaagaattcccagtaacttccttgtgttgtgtgtgttcaactcacagagttgaactttcatttacacagagcagatttgaaacactctttttgtggaatttgcaagtggagatgtcaagcgctttgaggccaaaggcagaaaaggaaatatcttcgtaaaaaaactagacagaatcattctcagaaactgctctgcgatgtgtgcgttcaactctcagactttaacttttcttttcattcagcagtttggaaacactctgtttgtaaagtctgcacgtggataatttgacaacttagaggccttcgttggaaacgggttttttcatgtaaggctagacagaagaattcccagtaacttccttgtgttgtgtacattcaactcacagagttgaacgttccgttagacagagcagatttgaaacactctttttgtgcaattggcaaatggagatttcaagcgctttaagttcaatggcagaaaaggaaatatcttcgtttcaaaactagacagaatcattgccacaaactgcgttgtgatgtgttcgttcaactcacagagtttaacctttcttttcatagagcagttaggaaacagtctgtttgtaaattctgtaagtggatattctgacatcttgtgaccttcgttggaaacgggatttcttcatattctgctagacagaagatttctcagaaatttccttgtgttgtgtgtattcaactcacagagttgaacgatcctttactcagagaagacttgaaacactccttctgtggaatttgcaagttgagatttcagccgctttgaggtcaatggtagaataggaaatatcttcctatagaaactagacagaatgattctcagaaactcctttgtgatgtgtgcgttcaactcacagagtttaacctttcttttcatagagcagttaggaaacactctgtttgtaaagtctgcaattggatattcagacctctttgaggccttcgttggaaacgggatttcttcatattatgctagacagaagaattctcagtaacttccttgtgttgtgtgtattcaactcacagagttggactatcctttacacagagcagacttgaaacactctttttgtggaatttgcaagtggagatttctgccgctttgaggtcaatggtagaaaaggaaatatcttcgtataaaaactagagagaatcattctcagaaactgctctgtgatgtgtgcgttcaactctcagagtttaacttttcttttcattcagcagtttggaaacactctgtttgtaaagtctgcacgtggatattttgaccatttagaggccttcgttggaaacgggtttttttcttgtaaggctagacagaagaattcccagtaacttccttgtgttgtgtacattcaactcacagagttgaacgttcccttagacagagcagatttgaaacactctttttgtgcaattggcaagtggtgatttcagctgctttgaggtcaatggtagaaaagggaatatcttcgtataaaaactagacagaatcattcccacaaactgcgttgtgatgtgttcgttcaactcacagagttttacctttctgttcatagagcagttaggaaacactctgtaaagtctgtaagtggatattctgacatcttgtggccttcgctggaaacgggatttcttcatattctgctagacagaagaattctcagtaacttccttgttgttgtgtgtattcaactcacagagttgaacgatcctttacacagagcagacttgtaacactctttttgtggaatttgcaagtggagatttcagccgctttgacgtcaaaggtagaaaaggaaatatcttcctataaaaactagacagaatgattctcagaaacttccttgtgatgtgtgcgttcacctcacagagtttaacctttcttttcatagagcagttaggaaacactctgtaaagtctgcaagtggatattcagacctctttgaggccttcgttggaaacgggtttttttcatataaggctagacagaagaattctcagtaacttccttgtgttgtgtgtattcaactcacagagttgaacgatcctttacacagagcagacttgaaacactctttttgtggagtttgcaagtggagatttcagccgctttgaggtcaatggtagaaaaggaaatatcttcgtataaaaactagacagaatcattctcagaaaatgctctgtgatgtgtgcgttcaactctcagagtttaacttttcttttcattcagcagtttggaaacactctgtttgtaaagtctgcacgtggatattttgaccacttagaggccttcgttggaaacgggtttttttcatgtaagggtagacagaagaattcccagtaacttccttgtgttgtgtgcattcaactcacagagttgaacgttcccttagacagagcagatttgaaacactctatttgtgcaatttgcaagtgtagatttcaagcgctttaaggtcaacggcagaaaaggaaatatcttcgtttcaaaactagacagaatcattcccacaaactgcgttgtgatgtgttcgttcaactcacagagtttaacctttctgttcatagagcagttaggaaacactctgtttgtaaagtctgcaagtagatattgagacctcctagaggccttcgttggaaacgggatttcttcatattctgctagacagaagaattctcagtaccttccttgtgttgtgtgtattcaactcacagagttgaacgatcctttacacacagcagacttgtaacactctttttgtggaatttgcaagtggagatttcagccgctttgaagtcaaaggtagaaaaggaaatatcttcctataaaaactagacagagtgattctcagaaactcctttgtgatgtgtgcgtttaactcacagagtttaacctttcttttcatagagcagataggaaacactctgtttgtaaagtctgcaagtggatattcagacctccttgaggccttcgttggaaacgggatttcttcatattatgctagacagaagaattcccagtaacttccttgtgttgtgtgtgttcaactcacagagttgaactttcatttacacagagcagatttgaaacactctttttgtggaatttgcaggtggagatttcaagcgctttgagaccaaaggcagaaaaggaaatatcttcgtataaaaactagacagaatcattctcagaaactgctctgcgatgtgtgcgttcaactctcagagtttaacttttcttttcattcagcagtttggaaacactcagtttgtaaactctgcaagtggatattcagacctctttgaggccttcgttggaaacgggatttcttcatactatgctagacagaagaattcccagtaacttccttgcgttgtgtacattcaactcacagagttgaacgttcccttagacagagcagatttgaaacactctttttgtgcaattggcaagtggagatttgaagcgctttgaggtcaatggcagaaaaggaattatcttcgtttcaaaactagacagaatgattctcagaaaatcttttgtgatgtgtgcgttcaactcacagagtttaacttttcttctcatagagcagttaggaaacactctgtttgtaaagtctgcaagtggatattcagacctgtttgaggccttcgttggatacgggatttcttcatattatgctagacagaataattctcagtaacttccttgtgttgtgtgtattcaactcacagagttgaaggatcctttacagagagcaggcttgaaacactctttttgtcgaatttgcaagtggagatttcagccgctttgaggtcaatggtagaataggaaatatcttcttatagaaactagacaaaatgattctcagaaacttcattgtgatgtgtgcgttcaactcacagagtttaacctttcttttcatagagcagttaggaaacactctgtttgtaaagtctgcaagtggatattcagacctctttgaggccttcgttggaaacgggtttttttcatgtaaggctagacagaagaattctcagtaacttccttgtgttgtgtgtattcacactgacagagttgaactttcatttagagagagcagttttgaaacactgtttttgtggaatttgcaagtggagatttcaagcgctttggggccaaaggcagaaaaggaaacatcttcgtatgaaaactagacagaaatcattctcagaaaactgctgcgtgatgtgtgcgttcaactctcagagtttaacttttcttttcattcagcggtttggaaacactctgtttgtaaagactgcacgtggatattttgaccacttagaggccttcgttggaaacgggtttttttcatgtaaggctagacagaagaattcccagtaacttccttgtgttgtgtgcattcaactcacagagttgaacgttcccttagacagagcagatttgaaacactctatttgtgcaatttgcaagtgtagatttcaagcgctttaaggtcaatggcagaaaaggaaatatcttcgtttcaaaactagacagaatgattctcagaaactcctttgtgatgtgtgccttcaactcacagagtttaacctttctgttcatagagcagttaggaaacactctgtttgtaaagtctgcaagtggatatccgacctccttgaggccttcgttggaaacgggatttcttcatattctgctagacagaataattctcagtaacttccttgtgttgtgtgtattcaactcacagagttcaacgatcctttacacagagcagacttgaaacactgtttttgtggaatttgcaagtggagatttcagccgctttgaggtcaatggtagaaaaggaaatatcttcctataaaaactagacagaatgattctcagaaactcctttctgatgtgtgcgttcaactcacagagtttaacttttcttttcatagagcagttaggaaacactctgtttgtaaagtctgcaagtggatattcagacctctttgaggccttcgttggaaacgggatttcttcatattatgctagacagaagaattctcagtaacttccttgtgttgtgtgtattcaactcacagagttgaactttcatttacacagagcagatttgaaacactctttttgtggaatttgcaagtggagatttcaagcgctttgaggccaaaggcagaaaaggaaatgtcttcgtttcaaaactagacagaatcattctcagaaactgctctgcgatgtgtgcgttcaactctcagagtttaacttttcttttcattcagcagtttggaaacactctggttgtaaagtctgcacgtggatattttgaccacttagaggccttcgttggaaacgggtttttttcctgtaaggctagacagaagaattcccagtaacttccttgtgttgtgtacattcaactcacagagttgaacgttcccttagacagagcagatttgaaacactctttttgtgcaattggcaaatggagatttcaagcgctttaaggtcaatggcagaaaaggaaatatcttcgtttcaaaactagacagaatgattctcagaaactcctttgtgatgtgtgcgttcaactcacagagtttaacttttcttttcatagagcagttaggaaacactcggtttgtaaagtctgcaagtggatattcagacctctttgaggccttcgttggaaacgggatttcttcatattatgctagacagaagaattctcagtaacttccttgtgttgtgtgtattcaactcacagagttgaacgatgctttacacagagcagacttgaaacattctttttgtggaatttgcaagtggagatttcagccgctttgaggtcaatggtagaataggaaatatcttcctatagaaactagacagaatgattctcataaactcctttgtgatgtgtgcgttgaactcacagagtttaacctttcttttcatggagcagttaggaaacactctgtttataaagtctgcaagtggatattcagacccctttgaggccttcgttggaaacgggatttcttcatattatgctagacagaagaattctcagtaacttccttgtgttgtgtgtattcaactgacagagttgaactttcatttagagagagcagatttgaaacactgtttttgtggaatttgcaaatggagatttcaagcgctttggggccaaaggcagaaaaggaaatgtcttcgtataaaaactagacagaatcattctcagaaactgctgcgtgatgtgtgcgttcaactctcagagtttaacttttcttttcattcagcggtttggaaacactctgtttgtaaagtctgcacgtggatattttgaccacttagaggccttcgttggaaactggttttttgcatgtaaggctagacagaagaattcccagtaacttccttgtgttgtgtgcattcaactcacagagttgaacgttcccttagacagagcagatttgaaacagcctatttgtgcaatttgcaagtgtagatttcaagcgctttaaggtcaacggcagaaaaggaaatatcttcctttcaaaacaagacagaatcattcccacaaactgcgttgtgatgtgttcgttcaactcacagagtttaacctttctgttcatagagcagttaggaaacactctgtttgtaaagtctgtaagtggatattctgacatcttgtggccttcgttggaaacgggatttcttcatattctgctagacagaagaattctcagtaacttccttgtgttgtgtgtattcaactcacagagttgaacgatcctttacacagagcagacttgaaacactcttttcgtggaatttgcaagtggagatttcagccgttttgaggtcaatggtagaaaaggaaatatcttcgtataaagactagacagaatgattctcagaaactcctttgtgatgcgtgcgttcaactcacagagtttaacctttcttttcatagagcagttaggaaacactctgtttgtaaagtctgcaagtggatattcagacctccttgaggccttcgttggaaacgggatttcttcatattatgctagacagaagaattctcagtaacttccttctgttgtgtttattcaactcacagagttgaatgatcctttacacagagcagacttgaaacactctttttgtggaaattgcaagtggagatttcagccgctttgaggtcaatggtagaaaagtaaatatcttcgtataaagactagacataatcattctcagaaactgctgtgtgatgtgtgcgttcaactctcagagtttaacttttcttttcattcagcggtttggaaacactctgtttgtaaagtctgcacgtggaaattttgaccacttagaggccttcgttggaaacgggtttttttcatgtaaggctagacagaagaattcccagtaacttccttgtgttgtgtacattcaactcacagagttgaacgttcccttagacagagcagatttgaaacactctttttgtgcaattggcaagtggagatttcaagcgctttaaggtcaatggcagaaaaggaaatatcttcgtttcaaaactagacagaatcattcccacaaactgcgttgtgatgtgttcgttcaactcacagagtttaacttttcttctcattcagcagtttggaaacactctgtttgtaaagtctgcacgtggataatttgaccacttagaggccttcgttggaaacgggtttttttcatgtaaggctagacagaagaattctcagtaacttcccttgtgttgtgtgtattcaactcacagagttgaacgatcctttacacagagcagacttgaaacactctttttgtggaatttgcaagtggagatttcagccgctttgaggtcaatagtcgaaaaggaaatatcttcgtagaaaaactagacaaaatgattctcagaaactcctttgtgatgtgtgcgttcaactcacagagtttaacctttcttttcatagagcagttaggaaacactctgtttgtaaagtctgcaagtggatattcagacctccttgaggccttcgttggaaacgggatttcttcatgttctgctatacagaagaattctcagtaacttcccttgtgttgtgtgtattcaactgacagagttgaactttcatttagagagagcagatttgaaacactgtttttgtggaatttgcaagtggagatttcaagcgctttgggaccaaaggcagaaaaggaaatatcttcgtataaaaactagacagaatcattctcagaaactgctctgcgatgtgtgcgttcaactctcagagtataacttttcttttcattcagcagtttggaaacactctgtttgtaaagtctgcacgtggataatttgaccacttagaggccttcgttggaaacgggtttttttcatgtaaggctagacagaagaattcccagtaacttccttgttgttgtgtgcattcaactcacagagttgaacgttcccttagacagagcagatttgaaacactctatttgtgcaatttgcaagtgtagatttcaagcgctttaaggtcaatggcagaaaaggaaatttcttcgttttaaaactagacagaattattctcagaaactcctttgtgatgtgtgcgttcaactcacagagttcaacctttcttttcatagagcagttgggaaacactctgtttgaaaagtctgcaagtggatattcagacttctttgaggccttcgttggaagcgggatttcttcatgttctgctagagagaagaattctcagaaacttccttgtgttgtgtgttttcaactcacagagttgaacgatgctttacacagagtagacttgaaacaatctttttgtgtaatttgcaagaggagatttcagccgctttgaggtcaatggtagaaaaggaaatatcttcgtataaaaactagacagaatgattctcagaaactcctttgtgatgtgtgcgttcaactcacagagtttaacctttcttttcatagagcagttaggaaacactctgtttgtaaagtctgcaagtggatattcagacctccttgaggccttcgttggaaacgggatttcttcatattatgctagacagaagaattctcagaaacttccttgtgttgtgtgtattgaactcacagagttgaatgatcctttactcagagcagacttgaaacactccttttgtggaatttgcaagtggagatttcagccgctttgaggtcaatggtagaataggaattatcttcctatagaaactagacagaatcattctcagaaactgctgcgtgatgtgtgcgttcaactctcagagtttaacttttcttttcattcagcggtttggaaacactctgtttgtaaagtctgcacgtggaaattttgaccacttagaggccttcgttggaaacggttttttttcatgtaaggctagacagaagaattcccagtaacttccttgtgttgtgtacattcaactcacagagttgaacgttcccttagacagagcagatttgaaacactctttttgtgcaattggcaaatggagatttcaagcgctttaagttcaatggcagaaaaggaaatatcttcgtttcaaaactagacagaatgattctcagaaactcctttgtgatgtgtgcgttcaactcacagagtttaacctttcttttcgtagagcagttaggaaacactctgtttgtaaagtctgcaagtggatattcagacctctttgaggccttcgttggaaacgggatttcttcatattctgctagacagaagaattctcagaaacttccttgtgttgtgtgcattcaactcacagagttgaacgatccgttacacagtgcagacttgaaacactctttttgtggaatttgcaaggggagatttcagccgctttgaggtcaatggtagtaaaggaaatatcttcgtataaaaactagacagaatgattctcagaatctcctttgtgatgtgtgcgttcaactcacagagtttaacctttcttttcatagagcagttaggaaacactctgtttgtaaagtctgcaagtggatattcagacctctttgaggccttcgttggaaacgggttttttacatataaggctaaacagaagaattcccagtaacttccttgtgttgtgtgtgttcaactcacagagttgaactttgatttacacagagcagatttgaaacactctttttgtggaatttgcaagtggagatttcaagcgctttgaggccaaaggcagaaaaggaaatatcttcgtataaaaacttgtcagaatcattctcagaaactgctctgcaatgtgcgcgttcaactctcagagtttaacttttcttttcattcagcagtttggaaacactctgtttgtaaagtctgcacgtggatattttgaccacttagaggccttcgttggaaacgggtttttttcctgtaaggctagacagaagaattcccagtaacttccttgtgttgtgtacattcaactcacagagttgaacgttcccttacacagagcagatttgaaacactctttttgtgcacttggcaagtggagatttcaagcgctttaaggtcaatggcagaaaaggaaatatcttcgtttcaaaactagacagaatcattctcagaaactgctctgcgatgtgtgcgttcaactctcagagtttaacttttcttttcattcagcagtttggaaacaatctgtttgtaaagtctgcacgtggataatttgaccacttagagaccttcgttggaaacgggtttttttcatgtaaggctagacagaagaattctcagaatcttccttgtgttgtgtgtattcaactcacagagttgaacgatcctttacacagagcagacttgaaacactctttttgtggaatttgcaagtggagatttcagccgctttgaggtccgtgttagaaaaggaaatatcttcgtacaaaaactagacagaatgattctcagaaactcctttgtgatgtgtgcgttcaactcacagagtttaaactttctttacatacagcagttaggaaacactctgtttgtaaagtctgcaagtggatattcagacctctttgaggccttcgttggaaacgggtttttttcatataaggctagacagaagaattcccagtaacttccttgtgttgtgtgtgttcaactcacagagttgaactttcatttacacagagcagatttgaaacactctttttgtggaatttgcaagtggagatttcaagcgctttcaggccaaaggcagaaaaggaaatatcttcgtataaaaactagacagaatcattctcagaaactgctctgcgatgtgtgcgttcaactctcagagtttaacttttcttttcattcagcagtttggaaacactctgtttgtaaagtctgcacgtggataatttgaccacttagagtccttcgttggaaacgggtttttttcatgtaaggctagacagaagaattctcagtaacttccttgtgttgtgtgtattcaactcacagagttgaacgatcctttacacagagcagacttgtaacactctttttgtggaatttgcaagtggagatttcagccgctttgaagtcaaaggtagaaaaggaaatatattcctataaaaactagacagaatgattctcagaaacttcttggtgatgtgtgcgttcaactcacagagtttaacctttcttttcatagagcagttaggaaacagtctgtttgtaaactctgcaagtggatattcagacctctttgaggccttcgttggaaacgggatttcttcatactgtgctacacagaagaattctcagtaacttccttgtgttgtgtgtattcaactcacagagttgaacgatcctttacacagagcagacttgaaacactctttttgtggaatttgcaagtggagatttcagccgcgttgaggtcaatggtagaaaaggaaatatcttcgtataaaaactagacagaatcattctcagaaactcctttgtgatgtgtgtgttcaactcacagagtttaacctttcttttcatagagcagttagtaaacactctgtttataaagtctgcaagtggatattcagacccctttgaggccttcgttggaaacgggatttcttcatattatgctagacagaagaattcccagtaacttccttgtgttgtgtgtgttcaactcacagagttgaactttcatttacacagagcagatttgaaacactctttttgtggaatttgcaagtggagatttcaagccctttgaggccaaaggcagaaaaggaaatatcttcgtataaaaactagacagcatcattctcagaaactgctctgcgatgtgtgcgttcaactctcagagtttaacttttcttttcattcagcagtttggaaacactctgtttgtaaagtctgcacgtggataacttgaccacttagaggccttcgttggaaacgggtttttttcatgtaaggctagacagaagaattcccagtaacttccttgtgttgtgtacattcaactcacagagttgaacgttcccttagacagagcagatttgaaacactctttttgtgcaattggcaaatggagatttcaagcgctttaaggtcaatggcagaaaaggaaatatcttcgtttcaaaactagacagaatcattcccacaaactgcgttgtgatgtgttcgttcaactcacagagtttaacctttcttttcatagaggagttaggaaacagtctgtttgtcaattctgtaagtggatattctgacatcttgtggccttcgttggaaacgggatttcttcatattctgctagacagaagaattcccagtaacttccttgtgttgtgtgtgttcaactcacagagttgaactttcatttacacacagcagatttgaaacactctttttgtggaatttgcaagtggagatttcagccgcgttgaggtcaatggtagaaaaggaaatatcttcgtataaaaactagacagaatgattctgagaaactcctttgtgatgtgagcgttcaactcacacagtttaacctttcttttcatagagcagttaggaaacactctgtttgtaaagtctgcaagtggatattcagacctccttgaggccttcgttggaaacgggatttcttcatattatgctagacagaagaattctcagtaacttccttgtgttgtgtgtattcaactcacagagttgaacgatcctttacacagagcagacttgaaacactccttttgtggaatttgcaattggagatttcagccgctttgaggtcaatggtagaataggaaatatcttcctatagaaactagacagaatgattctcataaactcctttctaatgtgtgcgttcaactcacaaagtttaacttttcttttcatagagcagttaggaaacactctgtttgtaaagtctgcaagtggatattcagacctctttgaggccttcgtaggaaacgggatttcttcatattatgctagacagaagaattcccagtaacttccttgtgttttgtgcattcaactcacagagttgaacgttcccttagacagagcagatttgaaacactctatttgtgcaatttgcaagtgtagatttcaagcgctttaaggtcaatggcagaaaaggaaatatcttcgtttcaaaactagacagaatcattcccacaaactgcgttgtgatgtgttcgttcaactcacagaatttaacctttctgttcatagagcagttaggaaacactctgtttgtaaagtctgtaagtggatattctgacatcttgtggccttcgttggaaacgggatttcttcatattctgctagacagaataattctcagtaacttccttgtgttgtgtgtattcaactcacagagttgaacgatcctttacacagagcagacttgaaacactctttttgtggaatttgcaagtggagatttcagccgctttgaggtcaatggtagaataggaaatatcttcctatagaaactagacagaatgattctcagaaacttctttgtgatgtgtgtgttcaactcacagagtttaacctttcttttcatagagtagttaggaaacactgtgttttcaaactctgcaagtggatattcagacctctttgaggccttcgttggaaacgggtttcttcatactgtgctagacagaagaattcccagtaacttccttgtgttgtgtgtgttcaactcacagagttgaactttcatttacccagagcagatttgaaacactctttttgtggaatttgcaagtggagatttcaagcgctttgaggccaaaggcagaaaaggaaatatcttcgtttcaaaactagacagaatcattctcagaaactgctctgcgatgtgtgcgttcaactctcagagtttaacttttcttttcattcaacagtttggaaacactctgtttgtaaagtctgcacgtggatattttgaccacttagaggccttcgttggaaacgggattttttcctgtaaggctagacagaagaattcccagtaacttccttgtgttgtgtacattcaactcacagagttgaacgttcccttagacagagcagatttgaaacactctttttgtgcaattggcaaatggagatttcaagcgctttaaggtcaatggcagaaaaggaaatatcttcgtttcaaaactagacagaatcattcccacaaactgcgttgtgatgtgttcgttcaactcacagagtttaacctttcttttcatagagcagttaggaaacagtctgtttgtaaattctgtaagtggatattctgacatcttgtggccttcgttggaaacgggatttcttcatattctgctagacagaaaaaattctcagtaacttccttgtgttgtgtgtattcaactcacagagttgatcgatcctttacacagagcatacttgaaacactcttcttgtggaatctgcaagtggagatttcagccgctttgaggtcaatggtagaataggaaatatcttcctatagaaactagacagaatgattctcataaactcctttgtgatgtgtacgttcaactcacagagtttaacatttcttttcatagagcagttaggaaacactctgtttgtaaagtctgcaagtggatattcagtcctccttgaggccttcgttggaaacgggatttcttcatattctgctagacagaagaattctcagtaacttccttgtgttgtgtgtattcaactgacagagttgaactttcatttggagagagcagatttgaaacactgtttttgtggaatttgcaagtggagatttcaagcgctttggggccaaaggcagaaaaggaaatatcttcgtataaaaacgagacagaatcattctcagaaactgctgtgtgatgtgtgcgttcaactctcagagtttaacttttcttttcattcagcggtttggaaacactctgtttgtaaagtctgcacgtggatattttgaccacttagaggccttcgttggaaacgggtttttttcatgtaaggctagacagaagaattcccagtaacttccttgtgttgtgtgcattcaactcacagagttgaacgttcccttagacagagcagatttgaaacactctatttgtgcaatttgcaagtgtagatttcaagcgctttaaggtcaacggcagaaaaggaaatatcttcgtttcaaaactagacagaattattcccacaaactgcgttgtgatgtgttcgttcaactcacagagtttaacctttctgttcatagagcagttaggaaacactctgtttgtaaagtctgtaagtggatattctgacatcttgtggccttcgttggaaacgggatttcttcatattctgctagacagaagaattctcagaatcttccttgtgttgtgtgtattcaactcacagagttgaacgatcctttacacagagcagacttgaaacactctttttgtggaatttgctagtggagatttcagccgctttgaggtccatggtagaaaaggaaatatcttcgtataaaaactagacagaatgattctcagaaactcctttgtgatgtgtgcgttcaactcacagagttcaacctttcttttcatagagcagttgggaaacactctgtttgtaaagtctgcaagtggatattcagacttctttgaggccttcgttggaagcgggatttcttcatgttctgctagacagaagaattctcagaaacttccttgtgttgtgtgttttcaactcacagagttgaacgatcctttacacagagcagacttgaaacactacttttgtggaatttgcaagtggagatttcagccgctttgaggtcaatggtagaataggaaatatcttcctatagaaactagacagaatcattctcagaaaccgctctgtgatgtgtgcgttcaactctcagagtttaacttttcttttcattcagcagtttggaaacactctgtttgtaaagtctgcacgtggatattttgaccacttagaggccttcgttggaaacgggtttttttcatgtaaggctagacagaagaattcccagtaacttccttgtgttgtgtgcattcacctcacagagctgaacgttcccttagacagagcagatttgaaacactctatttgtgcaatttgcaagtgtagatttcaagcgctttaaggtcaatggcagaaaaggaaatatcttcgtttcaaaactagacagaatgattctcataaactcctttgtgatgtgtgcgttcaactcacagagtttaacttttcttttcatagagcagttaggaaacactctgtttgtaaagtctgcaagtggatattcagacctctttgaggccttccttggaaacgggatttcttcatattctgctagacagaagaattctcagtaacttccttgtgttgtgtgtattcaactcacagagttgaacgatcctttacacagagcagacttgaaacattctttttgtggaatttgcaagtggagatttcagccgctttgaggtcaatggtagaataggaaatatcttcctatagaaactagacagaatgattctcagaaactcctttgtgatgtgtgcattcaactcacagagtttaacctttcttttcatagagcagttaggaaacactctgtttgtaaagtctgcaagtggatattcagacatccttgaggctttcgttggaaacgggatttcttcatattctgctagaaagaagaattctcagtaacttcccttgtgttgtgtgtattcaactcacagagttgaacaatcctttacacagagcagacttgaaacactctttttgtggaatttgcaagtggagatttcagccactttgaggtcaatggtagaataggaaatatcttcctatagaaactagacagaatcattctcagaaactgctgcttgatgtgtgcgttcaactctcagaatttaacttttcttttcattcagcggtttggaaacactctgtttgtaaagtctgcacgtggaaattttgaccacttagaggccttcgttggaaacgggtttttttcatgtaaggctagacagaagaattcccagtaacttccttgtgttgtgtgcattcaactcacagagttgaacgttcccttagacagagcagatttgaaacactctatttgtgtaatttacaagtgtagatttcaagcgcattaaggtcaatgacaaaaaggaaatatcttcgtttcaaaactagacagaatcattcccacaaactgcgttgtgatgtgttcgttcaactcacagagtttaacctttctgttcatagagcagttaggaaacactctggttgtaaagtttgccagtggatattcagacctctttgaggtcttcgttggaaacgggatttcttcatattctgctagacagaataattctcagtaacttccttgtgttgtgtgtattcaactcacagagttgaacgatcctttacacagagcagacttgaaacactctttttgtggaatttgtaagtggagatttcagccgctttgaggtcaatggtagaataggaaatatcttcctatagaaactagacagaatgattctcagaaactcctttgtgatgtgtgcgttcaactcacagagtttaacctttcttttcatagagcagttaggaaacactctgtttgtaaagtctgcaagtggatattcagacatccttgaggccttcgctggaaaagggatttcttcatattatgctagacagaagaattcctagtaacttccttgtgttgtgtgtgttcaactcacagagttgaactttcatttacacagagcagatttgaaacactctttttgtggaatttgcaagtggagatttcaagcgctttgagaccaaaggcagaaaaggatatatcttcgtataaaaactagacagaatcattctcagaaaatgctctgcgatgtgtgcgttcaactctcagagtttaacttttcttttcattcagcagtttggaaacaatctgtttgtaaagtctgcacgtggataatttgaccacttagaggccttcgttggaaacgggtttttttcatgtaaggctagacacaagaattctcagtaacttccttgtgttgtgtgtattcaactcacagagttgaacgatcctttacacagagcagacttgaaacactctttttgtggaatttgcaagtggagatttcagccgctttgaggtcaatgctagaataggaaatatcttcctatagaaactagacagaatgattctcagaaagtcctttgtgatgtgtgcgttcaactcacagagtttaacctttcttttcatagagcagttaggaaacactctgtgtgtaaagtctgcaagtggatattcagacctctttgaggccttcgttggaaacgggatttcttcatattatgctagacagaataattctcagtaacttccttgtgttgtgtgtattcaactcacagagttgaacgatcctttacagagagcagacttgaaacactctttttgtggaatttgcaagtggagatttcagccgctttgaggtcaatggtacaataggaaatatcttcctatagaaaatagacagaatgattctcagaaactcctttgtgatgtgtgtgttcaacccacagagtttaacctttcttttcatagagcagttagtaaacactctgtttataaagtctgcaagtggatattcagacccctttgaggccttcgttggaaacgggatttcttcatattatgctagacagaagaattcccagtaacttccttgtgttgtgtgtgttcaactcacagagttgaactttcatttacacagagcagttttgagacactctttttgtggaatttgctaatggagatttcaagcgctttgaggccaaaggcagaaaaggaaatatcttcgtataaaaactagacagaatcattctcagaaactgctctgcgatgtgtgcgttcaactctcagagtttaacttttcttttcattcagcagtttggaaacactctgtttgtaaagtctgcacgtggataatttgaccacttagaggccttcgttggaaacgggtttttttcatgtaaggctagacagaagaattctcagtaacttccttgtgttgtgtgtattcaactgacagagttgaactttcatttagagagagcagatttgaaacactgtttttgtggaatttgcaagtggagatttcaagcgctttaaggtcaacggcagaaaaggaaatatcttcgtttcaaaactagacagaatgattctcagaaactcctttgtgatgtgtgcgttcaagtcacagagttcaacctttcttttcatagagcagttgggaaacactctgtttgtaaagtctgcaagtggatattcagacttctttgaggccttcgttggaagcgggatttcttcatattctgctagacagaagaattctcagtaactgccttgtgttgtgtgtattcaactcacagagttgaacgatgctttacacagagcagacttgaaacactctttttgtggaatttgcaagtggagatttcagccgctttgaggtcaatggtagaataggaaatatcttcctatagaaactagacagaaatgattctcagaaactcctttgtgatgtgtgcgttcaactcacagagtttaacctttcttttcatagagcagttaggaaacactctgtttgtaaagtctgcaagtggatattcagacatccttgaggctttcgttggaaacgggatttcttcatattctgctagaaagagaattcccagtaacttccttgtgttgtgtgtgttcaactcacagagttgaactttcatttacacagagcagatttcaaacactctttttgtggaatttgcaaatggagatttcaagcgctttgaggccaaaggcagaaaaggaaatatcttcgtttcaaaactagacagaatcattctcagaaactgctctgtgatgtgtgcgttcaactctcagagtttaacttttgttttcattcagcagtttggaaacaatctgtttgtaaagtctgcacgtggatattttgaccacttagaggccttcgttgaaaacgggtttctttcatgtaaggggagacagaagaattcccagtaacttccttgcgttgtgtacattcaactcacagagttgaacgttcccttagacagagcagatttgaaacactctttttgtgcaattggcaagtggagatttcaagcgctttaaggtcaatggcagaaaaggaaatatcttcgtttcaaaactagacagaatgattctcagaaacttctttgtgatgtgtgcgttcaactcacagagtttaacctttcttttcatagagcagttaggaaacactctgtttgtaaactctgcaagtggatattcagacctcttggaggccttcgttggaaacgggatttcttcatactatgctagacagaagaattctcagtaacttccttgtgttgtgtgtattcaactcacagagttgaacgatcctttacacagagcagacttgtaacactctttttgtggaatttgcaagtggagatttcagccgctttgaagtcaaaggtagaaaaggaaatatcttcctataaaaactagacagaatgattctcagaaactcctttgtgatgtgtgcgttcaactcacagagtttaacctttcttttcatagagcagttaggaaacactctggttgtaaagactacaagtggatattcagacctctttgaggccttcgttggaaacgggtttttttcctgtaagtctagacagaagaattcccagtaacttccttgtgttgtgtgtgttcaactcacagagttgaactttgatttacacagagcagatttgaaacactctttttgtggagtttgcaagtggagatttcaagcgctttgaggccaaaggcagaaaaggaaatatcttcgtataaaaactagacagaatcattcccacaaactgcgttgtgatgtgtgcgttcaactcacagagtttaacctttcttttcatagagccgtttgtaaacgctctgtttgccaagtctgcaagtggatattctgacatcttgtggacttcgttggaaacgggatttcttcatattctgctagacagaagaattctcagaaacttccttgtgttctgtgtattcaactcacagagttgaacgatcctttacacagagcagatttgacacactctttttgtggaatttgcaagtggagatttcagccgctttgaggtccatggtagaaaaggaaatatcttcgtataaaaactagacagaatgattctcagaaacttctttgtgatgtgtgcgttcaactcacagagtttaacctttcttttcatagagcagttaggaaacactctgtttgtaaatcagcaagtggatattcagacctctttgaggccttcgttggaaacggaatttcttcatattatgctagacagaggaattctcagtaacctccttgtgttgtgtgtactcaactcacagagttgaacgatcctttacacagagcagactagaatcactctttttgtggaatttgcaagtggagatttcagccgctttgaggtcaatggtagaaaaggaaatatcttcgtataaaaactagacagaatgattcccagaaactcctttgtgatgtgtacgttcaactcacagagtttaacctttcttttcatagagcagttaggaaacactctgtttgtaaactctgcaagcggatattcagaccgctttgaggccttcgttggaaacgggatttcttaatattatgctagacaaaagaattcccagtaacttccttgtgttgtgtgtgttcaactcacagagttgaactttcatttacacagagcagatttgaaacactctttttatggaatttgcaaatggaggtttcaagcgctttgaggccaaaggcagaaaaggaaatatcttcgtataaaaactagacagaatcattctcagaaactgctgcgtgatgtgtgcgttcaactcacagagtttaacttttcttttcattcagcggtttggaaacactctgtttgtaaagtctgcacgtggatattttgaccacttagaggccttcgttggaaacgagattttttcatgtaaggctagacagaagaattcccagtaacttccttgtgttgtgtgcattcaactcacagagttgaacgttcccttagacagagcagatttgaaacactctatttgtgcaacttgcaagtgtagatttcaagcgctttaacctcaatggcagaaaaggaaatatcttcgtttcaaaactagacagaatcattcccacaaactgctttgtgatgtgttcgttcaactcacagagtttaacctttcttttcatagagcagttaggaaacagtctgtttgtcaattctgtaagtggatattctgacatcttgtggccttcgttggaaacgggatttcttcatattctgctagacagaagaattcttagaaacttccttgtgttgtgtgttttcaactcacagagttgaacgatcctttacacagagcagacttgaaacactctttttgtggaatttgcaagtggagatttcagccgctttgaggtcaatggtagaataggaaatatcttcctatagaaagtagacagaatgattctcagaaactcctttgtgatgtgtgcgttcaactcacagagtttaacctttcttttcatagagcagttaggaaacactctgtttgtaaagtctgcaagtggatattcagacctccttgaggccttctttggaaacgggatttcttcctattatgctagacagaagaattctcagtaacttccttgtgttgtgtgtattcaactcacagagttgaacgatcctttacacagagcagacttgaaacactctttttgtggaatttgcaagtggagatttcagccgctttgaggtcaatggtagaataggaaatatcttcctgtagaaactagacagaatcattctcagaaactgctctgcgatgtgtgcgttcagctctcagagtttaacttttcttttcattcagcagtttggaaacactctgtttgtaaagtctgcacgtgcataatttgaccacttagaggccttcgttggaaacgggtttttttcatgtaaggctagacagaagaattcccagtaacttccttgtgttgtgtacattcaactcacagagttgaacgttcccttagacagagcagatttgaaatactctttttatgcaattggcaagtggagatttcaagcgctttaaggtcaatggcagaaaaggaaatatcttcgtttcaaaactagacagaatcattcccacaaactgcgttgtgaagtgctcgttcaactcatagagtttaacctttctgttcatagagcagttaggaaacactctgtttgaaaagtctgtaagtggatattctgacatcttgtggccttcgttggaaacgggatttcttcatattctgctagaaagaagaattctcagtaacttccttgtgttgtgtgtattcaactcacagagttgaacgatcctttacacagagcagacttgaaacactctttttgtggaatttgcaagtggagatttcagccgctttgaggtcaatggtagaataggaaatatcttcctatagaaactagacagaatgattctcagaaactcctttgtgatgtgtgcgttcaactcacagagtttaacctttcttttcatagagcagttaggaaacactctgtttgtacagtctgcaagtggatattcagacctccttgaggccttcgttggaaacgggtttttttcatataaggctagacagaagaattcccagtaacttccttgtgttgtgtgtgttcaactcacagagttgaactttcatttacacagagcagatttgaaacactctttttgtggaatttgcaagtggagatttcaagcgctttgaggccaaaggcagaaaaggaaatatcttcgtttcaaaactagacagaatcattctcagaaactgctctgcgatgtgtgccttcagctctcagagtttaacttttcttttcattcagcagtttggaaacactctgtttgtaaagtctgcacgtggatattttgaccacttagaggtcttcgttggaaacgggtttttgtcatgtaaggctagacagaagaattcccagtaacttccttgtgttgtgtgcattcaactcacagagttgaactttcccttagacggagcagatttgaaacactctatttgtgcaatttgcaagtgtagatttcaagcgctttaaggtcaatggcagaaaaggaaatatcttcgtttcaaaactagagagaatcattcccacaaactgcgttgtgatgtgttcgttcaactcacagagtttaacctttctgttcatagagcagttaggaaacactctgtttgtaaagtctgtaagtggatattctgacatcttgtggccttcgttggaaacgggatttcttcgtattctgctagacagaagaattctcagtaacttccttgtgttgtgtgtattcaactcacagagttgaacgatcctttacacagagcagacttgaaacactctttttgtgtaatttgcaagtggagatttcagccgctttgaggtcaatggtagaaaaggaaactatcttcatataaagactagacagaatgattctcagaaaatcttttgtgatgtgtgcgttcaactcacagagtttaacttttcttctcatagagcagttaggaaacactctgtttgtaaagtctgcaagtggatattcagacctctttgaggccttcgttggaaacgggatttcttcatattatgctagacagaagaattcccagtaacttccttgtgttgtgtgtgttcaactcacagagttgaactttcatttacacagagcagattggaaacactctttttgtggaatttgcaagtggagatttcaagcgctttgaggacaaaggcagaaaaggatatatcttcgtataaaaattagacagaaatcattctcagaaactgctctgcgatgtgtgcgttcaactctcagagtttaacttttcttttcattcagcagtgtggaaaaactctgtttgtaaagtctgcacgtggatattctgaccacttagaggccttcgttggaaacgggtttttttcctgtaaggctagacagaagaattcccagtaacttccttgtgttgtgtacattcaactcacagagttgaacgttcccttagacagaacagatttgaaacactctttttgtgcaattggcaagtggtgatttcagccgctttgaggtcaatggtagaaaaggaaatatcttcgtataaaaactagacagaatgattctcagaaactcctttgtgatgtgtgcgttcaactcacagagttttacctttcttttcatagagcagttaggaaacactctgtttgtaaagtctgcaagtggatattcagacctctttgaggccttcgttggaaacgggatttcttcatattatgctagacggaaggattctcagtaacttccttgtgttgtgtgtattcaactcacagagttgaacgatcctttacacagagcagacttgaaacactctttttgtggaatttgcaagtggagatttcagcctctttgaggtcaatggtagaaaaggagatatcttcgtataaaaactagacagaatgattctcagaaactcctttgtgatgtgtgcgttcaactcacagagtttaacctttcttttcatagagcagttaggaaacactctgtttgtaaagtctgcaagtggatattcagacctctttgaggccttcgttggaaacgggatttcttcatattatgctagacagaagaatttcccagtaacttccttgtgttgtgtgtgttcaactcacagagttgaactttcatttacacagagcagatttgaaacactctttttgtggaatttgcaagtggagatttcaagcgctttgaggccaaaggcagaaaaggaaatatcttcgtttcaaaactagacagaatcattctcagaaactgctctgcgatgtgtgcgtccaactctcagagtttaacttttcttttcattcagcagtttgcaaacactctgtttgtaaagtctgcacgtggatattttgaccacttagaggccttcgttggaaacgggtttttttcatgtaaggctagacagaagatttcccagtaacttccttgtgttgtgtacattcaactcacagagttgaacgttcccttaggcagagcagatttgaaacactctttttgtgcaattggcaaatggagatttcaagcgctttaaggtcaatggcagaaaaggaaatatcttcgtttcaaaactagacagaatcattcccacaaactgcgttgtgatgtgttcgttcaactcacagagtttaacctttctgttcatagagcagttaggaaacactctgtttgtaaagtctgtaagtggatattctgacatcttgtggccttcgttggaaacgggatttcttcatattctgctagacagaagaattctcagtaacttccttgtgttgtgtgtattcaactcacagagttgaacgatcctttacacagagcagacttgaaacactctttttgtggaatttgcaattggagatttcagccgctttgaggtcaatggtagaaaaggaaactatcttcatataaagattagacagaatgattctcagaaactcctttgtgatgtgtgagttcaactcacagagtttaacctttcttttcatagagcagttaggaaacactctgtttttaaagtctgcaagtggatattcagacctctttgaggccttcgttggaaacgggtttttttcatataaggctagagagaagaattctcagtaacttccttgtgttgtgtgtattcaactgacagagttgaactttcatttagacagagcagatttgaaacactatttatgtggaattggcaattggagatttcaacctctttgaggccaaaggcagaaaaggaaatatcttcgtttcaaaactagacagaatcattctcagaaactgctctgcgatgtgtgcgttcaactctcagagtttaacttttcttttcattcagcattttggaaacactctgtttgtaaagtctgcacgtggataatttgaccacttagaggccttcgttggaaacgggtttttttcatgtaaggctagacagaagaattcccagtaacttccttgtgttgtgtacattcaactcacagagttgaacgttcccttagacagagcagatttgaaacactctttttgtgcaattggcaagtggagatttcaagcgctttaaggtcaatggcagaaaaggaaatatcttcgtttcaaaactagacagaatcattcccacaaactgcgttgtgctgtgttcgttcaactcacagagattaacctttcttttcatagagcattaggaaacagtctgtttgtaaattctgtaagtggatattctgacatcttgtggccttcgttggaaacgggatttcttcatattctgctagacagaagaattctcagtaacttccttgtgttgtgtgtattcaactcacggagttgaacgatcctttacacagagcagacttgaaacactctttttgtggaatttgcaagtggagatttcagccgctttgaggtcaatggtagaataggaaatatcttcctatagaaactagacagaatgattctcagaaactcctttgtgatgtgtgcgttcaactcacagagtttaactttccttttcatagagcagttaggaaacactctgtttgtaaagtctgcaagtggatattcagacctctttgaggccttctttggaaacgggatttcttcatattctgatatacagaagaattcccagtaacttccttgtgttgtgtgtgttcaactcacagagttgaactttcatttacacagagcaggtttgaaacactctttttgtggtatttgcaaatggagatttcaagcgctttgtggccaaatgcagaaaaggaaatatcttcgtataaaaactagacagaatgattctcagaaaatcctttgtgatgtgtgcgttcaactcacagagtttaacttttcttttcatagagcaattaggaaacactctgtttgtaaagtctgcaagtggatattcagacctctttgaggccttcgttggaaacgggatttcttcatattatgctagacagaagaattctcagtaacttccttgtgttgtgtgcattcaactcacagagttgaacgttcccttagacagagcagatttgaaacactctatttgtgcaatttgcaagtgtagatttcaagcgcattaaggtcaaaggcagaaaaggaaatatcttcgtttcaaaactagacagaatcattcccacaaactgcgttgtgatgtgttcgttcaactcacagagtttaacctttcttttcatagagcagttaggaaacagtctgtttgtcaattctgtaagtggatattctgacatcttgtggccttcgttggaaacgggatttcttcatattctgctagacagaagaattctcagtaacttccttgtgttgtgtgtattcaactcacagagttgaacgatcctttacacagggcagacttgaaacactctttttgtggaatttgcaagtggagatttcagccgcgttgaggtcaatggtagaaaaggaaatatcttcgtataaaaactagacagaatgattctcagaaactcctttgtgatgtgtgcgttcaactcacagagttcaacctttcttttcatagagcagttgggaaacactctgtttgtaaagtctgcaagtggatattcagacttctttgaggccttcgttggaagcgggatttcttcatattctgctagacagaagaattctcagtaacttccttgtgttgtgtgtattcaactcacagagttgaacgatcctttacacagagcagacttgaaacactctttttgtggaatttgcaaggggagatttcagccgctttgaggtcaatggtagaataggaaatatcttcctatagaaactagacagaatcattctcagaaactgctctgcgatgtgtgcgttcaactctcagagtttaacttttcttttcattcagcagtttggaaacactctgtttgtaaagtctgcacgtggataatttgaccacttagaggccttcgttggaaacgggtttttttcatgtaaggctagacagaagaattcccagtaacttccctgtgttgtgtacattcaactcacagagttgaacgttcccttagacagagcagatttgaaacactctttttgtgcaattggcaagcggagatttcaagcgctttaaggtcaatggcagaaaaggaaatatcttcgtttcaaaactagacagaatcattatcaaaaactgcgttgtgatgtgttcgttcaactcacagagtttaacctttcttttcatagagcagttgggaaacagtctgtttgtaaattctgtaagtggatattctgacatcttgtggccttcgttggaaacgggatttcttcatattctgctagacagaagaattctcagtaacttccttgtgttgtgtgtattcaactcacagagttgaacgatcctttacacagagcagacttgaaacactctttttgtggaatttgcaagtggagatttcagccgctttgaggtcaatggtagaaaaggaaatatcttcgtataaaaactagacagaatgattctcagaaaatcttttgtgatgtgtgcgttcaactcacagagtttaacttttcttctcatagagcagttaggaaacactctgtttgtaaagtctgccagtggatattcagacctctttgaggtcttcgttggaaacgggatttcttcatattatgctagacagaagaattcccagtaacttccttgtgttgtgtgtgttgaactcacagagttgaactttcatttacacagagcagatttgaaacactctttttgtggaatttgcaagtggagatttcaagcgctttcaggccaaaggcagaaaaggaaatatcttcgtataaaaactagacagaatcattctcagaaactgctctgcgatgtgtgcgttcaactctcagagtttaacttttcttttcattcagcagtttggaaacactctgtttgtaaagtctgcacgtggataatttgaccacttagaggccttcgttggaaacgggtttttttcatgtaaggctagacagaagaattcccagtaacttccttgtgttgtgtacattcaactcacagagttgaacgttcccttagacagagcagatttgaaacactctttttgtgcaattggcaagtggagatttcaagcgctttaaggtcaatggcagaaaaggaaatatctgcgtttcaaaactagagagaacgattctcagaaactcctttgtgatgtgtgcgttcaactcacagcagtttaacctttctgttcatagagcagttaggaaacactctgtttgtaaaatctgcaagtggatattcagacctctttgaggccttcgttggaaacgggatttcttcatattctgctagacagaagaattctcagtaacttccttgtgttgtgtgtattcaactcacagagttgaacgatcctttacacagagcagacttgaaacactctttttgtggaatttgcaagtggagatttcagccgctttgaggtcaatagtcgaaaaggaaatatcttcgtagaaaaactagacagaatgattctcagaaacttctttgtgatgtgtgcgttcaactcacagagtttaacctttcttttcatagagcagttaggaaacactctgtttgtaaactctgcaagtggatattcagacctctttgaggccttcgttggaaacgggatttcttcatactatgctagacagaagaattctcagtaacttccttgtgttgtgtgtattcaactgacagagttgaactttcatttagacagaggagatttgaaacactctttttgtggaatttgcaagtggagatttcaagcgctttgaggccaaaggcagaaaaggaaatatcttcgtataaaaactagacagaatcattctcagaaactgctgcgtgatgtgtgcgttcaactctcagagtttaacttttcttttcattcagcggtttggaaacactctgtttgtaaagtctgcacgtggatattttgaccacttagaggccttcgttggaaacgggtttttttcatgaaggctagacagaaagaattcccagtaacttccttgtgttgtgtgcattcaactcacagagttgaacgttcccttaggcagagcagatttgaaacactctatttgtgcaatttgcaagtgtagatttcaagcgctttaaggtcaatggcagaaaaggaaatatcttcgtttcaaaactagacagatgattctcagaaacttcattgtgacgtgtgcgttcaactcacagagtttaacctttcttttcatagagcagttaggaaacactctgtttgtaaagtctacaagtggatattcagacctctttgaggccttcgttggaaacgggatttcttcatactgtgctagacagaagaattctcagtaacttccttgtgttgtgtgtattcaactcacagtagttgaacgatcctttacacagagcggacttgaaacacactttttgtggaatttgcaagtggagatttcagccgcgttgaggtcaatggtagaaaaggaaatatcttcgtataaaaactagacagaatgattctcagaaactcctttgtgatgtgtgtgttcaactcacagagtttaacctttcttttcatagagcagttaggaaacactctgtttgtaaagactgcaagtggatattcaggcctctttgaggccttcgttggaaacgggttttttcatataaggctagacagaagaattcccagtaacttccttgtgttgtgtgtgttcaactcacagagttgaactttcatttacacagagcagattggaaacactctttttgtggaatttgccagtggagatttcaagcgcattgaggccaaaggcagaaaaggaaatatcttcgtataaaaactagacagaatcattctcagaaactgctctgtgatgtgtgcgttcaactctcagagtttaacttttcttttcattcagcagtttggaaaccctctgtttgtaaagtctgcacgtggatattttgaccacttagaggccttcgttggaaacgggtttctttcctttaaggctagacagaagaattcccagtaacttccttgcgttgtgtacattcaactcacagagttgaacggttcccttagacagagcagatttgaaacactctttttgtgcaattggcaagtggagatttcaagcgctttaaggtcaatggcagaaaaggaaatatcttcgtttcaaaactagacagaatcattctcacaaactgcgttgtgatgtgttcgttcaactcacagagtttaacctttctgttcatagagcagttaggaaacactctgtttgtaaagtctgtaagtggatattctgacatcttgtggctttcgttggaaacgggatttcttcatattctgctagacagaataattctcagtaacttccttgtgttgtgtgtattcaactcacagagttgaacgatcctttacacagagcagacttgaaacactctttttgtggaatttgcaagtggagatttcagccgctttgaggtcaatagtagaaaaggaaatatcttcgtagaaaaactagacagaatgattctcataactcttttgtgatgtgtgcgttcaactcacagagttcaacctttcttttcatagagcagttgggaaacactctgtttgtaaagtctgcaagtggatattcagacttctttgaggccttcgttggaagcgggatttcttcatattctgctagacagaagaattctcagtaatttccttgtgttgtgtgtattcagctgacagagttgaactttcatttagagagagcagatttgaaacactgtttttgtggaatttgcaagtggatatttcaagcgatttgaggccaaaagcagaaaaggaaatatcttcgtataaaaactagacagaatcattctcagaaactgctctgcgatgtgtgcgttcaactctcagagtttaacttttcttttcattcagcagtttggaaacactctgtttgtaaagtctgcacgtggataatttgaccacttagaggccttcgttggaaacgggtttttttcatgtaaggctagacagaagaattctcagtaacttccttgtgttgtgtgtattcaactcacagagttgaacgatcctttacacagagcagacttgaaacactctttttgtggaatttgcaagtggagatttcagccgctttgaggtcaatggtagaaaaggaaatatcttcgtgtagaaacaagacagaatgattctcagaaactcctttgtgatgtgtgcgttcaactcacagagtttaacctttcttttcatagagcagttaggaaacactctgtttgtaaagtctgcaagtggatattcagacctctttgaggccttcgttggaaacggcatttcttcacattatgctagacagtttaattctcaataacttccttgtgttgtgtgtattcaactcacagagttgaacgatcctttacagagagcagacttgaaacactctttttgtggaatttgcaagtggagatttcagccgctttgaggtcagtggtagaataggaaatatcttcctatagaaactagacagaatgattctcagaaactcctttgtgatgtgtgcgttcaactcacagagtttaacctttcttttcatagagcagttaggaaacactctgtttgtaaagtctgcaagtggatattcagacctctttgaggccttcgttggaaacgggatttcttcatattctgctagacagaagaattctcagtaacttccttgtgttgtgtgtattcaactcttagagttgaacgatcctttacagagagcagacttgaaacactctttttgtggaatttgcaagtggagatttcagccgctttgaggtcaatggtagaataggaaatatcttcctatagaaactagacagaatcattctcagaaactgctgcgtgatgtgtgcgttcaactctcagagtttaacttttcttttcattcagcggtttggaaacactctgtttgtaaagtctgcacgtggatattttgaccacttagaggccttcgttggaaacgggtttttttcatgtaaggctagacagaagaattcccagtaacttccttgtgttgtgtgcattcaactcacagagttgaacgttcccttagacagagcagatttgaaacactctatttgtgcaatttgcaagtgtagatttcaagcgctttaaggtcaatggcagaaaaggaaatatcttcgtttcaaaactagacagtatcattcccacaaactgcgttgtgatgtgttcgttcaactcacagagtttaacctttctgttcatagagcagttaggaaacactctgtaaagtctgtaagtggatattctgacatcttgtggccttcgttgtaaacgggatttcttcatattctgctagacagaagaattctcagtaacttccttgtgttgtgtgtattcaactcacagagttgaacgatcctttacacagagcagacttgaaacactctttttgtggaatttgcaagtggagatttcagcctctttgaggtcaatggtagaataggaaatatcttcctatggaaactagacagaatgattctcagaaactcctttgtgatgtgtgcgttcaactcacagagtttaacctttcttttcatagagcagttgggaaacactctgtttgtaaagtctgcaagtggatattccgacatccttgaggctttcgttggaaacgggatttcttcatattctgctagaaagaagaattctcagtaacttccttgtgttgtgtgtattcaactcacagagttgaacgatcctttatacagagcagacttgaaacactctttttgtggaatttgcaagtggagatttcagccgctttgaggtcaatggtagaataggaaatatcttcctatagaaactagacagaacgattctcagaaactcctttgtgatgtgagcgttcaactcacagagtttaacctttcttttcatagagcagttaggaaacactctgtttgtaaagtctgcaagtggatattcagacctctttgaggccttcgttggaaacgggatttcttcatattctgctacacagaagaattcccagtaacttccttgtgttgtgtgcattccactcacagagttgaacgttcccttagacagagcagatttgaaacactctatttgtgcaatttgcaagtgtagatttcaagctctttaaggtcaatggcagaaaaggaaatatcttcgtttcaaaactagacagaatcattcccacaaactgcgttgcgatgtgttcgttcaactcacagagtttaacatttcttttcatagagcacttaggaaacagtctgtttgtaaattctgtaagtggatattctgacatcttgtggccttcgttggaaacaggatttcttcatattctgctagacagaagaattctcagtaacttccgggtgttgtgtgtattcaactcacagagttgaacgatcctttacacagagcagacttgaaacactctttttgtggaatttgcaagtggagatttcagccgctttgaggtcaatggtagaaaaggaaataccttcctataaaaactagacagaatgattctcataaactcctttgtgatgtgtgcgttcaactcacagagtttaacttttcttttcatagagcagttaggaaacactctgtttgtaaagtctgcaagtggatattcagacctccttgaggccttcgttggaaacgggatttcttcatattctgctagacagaagaattctcagtaacttccttgagttgtgtgtattcaactcacagagttgaacgatcctttacacagagcagacttgaaacattctttttgtggaatttgcaagtggagatttcagccgctttgaggtcaatggtagaataggaaatatcttcctatagaaactagacagaatcattctcagaaactgctgcgtgatgtgttcgttcaactctcagagtttaacttttcttttcattcagcggtttggaaacactctgtttgtaaagtctgcacgtggaaattttgaccacttagaggccttcgttggaaacgggtttttttcatgtaaggctagacagaagaattcccagtaacttccttgtgttgtgtgcattcaactcacagagttgaacgttcccttagacagagcagatttgaaacactctatttgtgcaatttgcaagtgtagatttcaagcgctttaaggtcaacggcagaaaaggaaatatcttcgtttcaaaactagacagaatgattctcagaaactcctttgtgatgtgtgcgttcaactcacagagtttaacctttcttttcatagagcctttaggaaacactctgtttgtaaagtctgcaagtggatattcagacctccctgaggccttcgtcggaaatgggatttcttcatattctgctagacagaagaattctcactaacttccttgtgttgtgtgtgttcaactcacagagttgaacgatcctttacacagagcagacttgaaacactctttttgtggaatttgcaagtggagatttcagccgctttgaggtcaatggtagaataggaaatatcttcctatagaaaatagacagaatgattctcagaaactcctttgtgatgtgggcgttcaactcacagagtttaacctttcttttcatagagcagttaggaaacactctgtttgtaaagtctgcacgtggatatttggacttctttgaggccttcgttggaaacgggtttttttcatgtaaggctagacggaagaattcccagtaacttctttgtgttgtgtgtgttcaactcacagagttgaactttgatttacacagagcagatttgaaacactctttttgtggaatttgcaagtggagatttcaagcgatttgaggccaaaggcagaaaaggaaatatcttcgtataaaaactagacagaatcattctcagaaactgctgcgtgatgtgtgcgttcaagtctcagagtttaacttttgttttcattcagcggtttggaaacactctgtttgtaaagtctgcacgtggaaattttgaccacttagaggccttcgttggaaacgggtttttttcatgtaaggctcgacagaagaattcccagtaacttccttgtgttgtgtacattcaactcacagagttgaacgttcccttagacagagcagatttgaaacactctttttgtgcaattggcaagtggagatttcaagcgctttgaggtcaatggcagaaaaggaaatatcttcgtttcaaaactagacagaatcattcccacaaactgcgttgtgatgtgttcgttcaactcacagagtttaacctttcttttcatagaccagttaggaaacagtctgtttgtcaattctgtaagtggatattctgacatcttgtggccttcgttggaaacgggatttcttcatattctgctagacagaagaattctcagtaacttccttgtgttgtgtgtattcaactcacagagttgaaggatcctttacagagagcaggcttgaaacactctttttgtcgaatttgcaagtggagatttcagccgctttgaggtcaatggtagaataggaaatatcttcctatagaaactagacagaatgattctcagaaactcctttgtgatgtgtgcgttcaactcacagagtttaacctttcttttcatagagcagttaggaaacactctgtttgtaaagtctgcaagtggatattcagacctctttgaggccttcgttggaatcgggtttttttcatataaggctagacagaagaattcccagtaacttccttgtgttgtgtgtgttcaactcacagagttgaactttcatttacacagagcagatttgaaacactctttttgaggaatttgcaagtggagatgtcaagcgctttgaggccaaaggcagaaaaggaaatatcttcgtataaaaactagacagaatgattgtcagaaactcctttgtgatgggtgtgttcaatttaaagagtttaacttttcttttcataaagcagttaggaaacactctgtttgtaaagtctgcaagtggatattttgacctatttgaggccttcgttggaaacgggtttttttcctgtaaggctagatagaagaattcccagtaacttccttgtgttgtgtacattcaactcacagtgttgaacgttcccttagacagagcagatttgaaacactctttttgtgcaattggcaagtggagatttcaagcgctttaaggtcaatggcagaaaaggaaatatcttcatttcaaaactagacagaatcattcccacaaactgcgttgtgatgtgttcgttcaactcacagggtttaacctttcttttcacagagcagttaggaaacactctgtttgtaaagtctgcacgtggatattttgacctctttgaggccttcgttggaaacgggttttttcatataaggctagacagaagaattctcagaatcttccttgtgttgtgtgtattcaactcacagagttgaacgatcctttacacagagcagacttgtaacactctttttgtggaatttgcaagtggagatttcagccgctttgaggtcaatggtagaaaaggaaatctcttcgtataaaaactagacagaatgattctcagaaactcctttgtgatgtgtgcgttcaactcacagagttcaacctttcttttcatagagcagttggaaaacactctgtttgtaaagtctgcaagtggatattcaaactttctttgaggccttcgttggaagcgggatatcttcatattctgctagacagaagaattcccagtaacttccttgtgttgtgtgtgttcaactcacagagttgaactttgatttacacagagcagatttgaaacactctttttgtggaatttgcaagtggagatttcaagcgctttgaggccaaaggcagaaaaggaaatatcttcgtataaaaagtagacagaatcattctcagaaactgctctgcgatgtgtgcgttcaactctcagagtttaacttttcttttcattcagcagtttggaaacactctgtttgtaaagtctgcacgtggatattttgaccacttagaggccttcgttggaaacgggtttttttcctgtaaggctagacagaagaattcccagtaacttccttgtgttgtgtgcattcaactcacagagttgaacgttcccttagacagagcagatttgaaacactctatttctgcaatttgcaagtgtagttttcaagctctttaaggtcaacggcagaaaaggaaatatcttcgtttcaaaactagacagaatcattcccacaaactgcgttgtgatgtgttcgttcaactcacagagtttaacctttctgttcatagagcagttaggaaacactctgtttctaaagtctgtaagtggatattctgacatcttgtggccttcgttggaaacgggatttcttcatattctgctagacagaagaattctcagtaactttccttgtgttgtgtgttttcaactcacagagttcaaccatcctttacacagagtagacttgaaacactctttttgtggaattggcagggtggagatttcagccgctttgaggtcaatggtagaaaagtaaatatcttcgtataaaaactagacagaatgattctcagaaactcctttgtgatgtgtgcgttcaactcacagagtttaacctttcttttcatagagcagttaggaaacactctgcttgtaaagtctgcatgtggatattcagccctctttgaggccttcgttggaaacgggtttttttcatataaggctagacagaagaattcccagtaacttccttgtgttgtgtgtgttcaactcacagagttgaactttcatttacacagagcagatttgaaacactctttttgtggaatttgcaagtggagatttcaagcgctttgaggccaaaggcagaaaaggaaatatcttcgtataaaaactagacagaatcattctcagaaactgctgcgtgatgtgtgcgttcaactctcagcagtttaacttttcttttcattcagcggtttggaaacactctgtttgtaaagtctgcacgtggatattttgaccacttagagaccttcgttggaaacgggtttttttcatgtaaggctagacagaagaattcccagtaacttccttgtgttgtgtacattcaactcacagagttgaacgttcccttagacagagcagatttgaaacactctttttgtgcaattggcaagtggagatttcaagcgctttaaggtcaattgcagaaaaggaaatatcttcgtttcaaaactagacagaatgattctcagaaactcctttgtgatgtgtgcgttcaactcacagagtttaacctttcttttcatagatcagttaggaaacactctgtttgtaaagtctgcaagtgaatattcagacctctttgaggtcttcgttggaaacgggatttcttcatattctgctagacagaagaattctcagtaacttccttgtgttgtgtgtattcaactcacagagttgaacgatcctttacacagagcagacttgaaacactctttttgtggaatttgcaagtggagatttcagccgctttgaggtcaatggtagaaaaggaaactatcttcatataaagactagacagaatgattctcagaaaatcttttgtgatgtgtgcgttcaactcacagagtttaactattcttctcatagagcagttaggaaacactctgtttgtaaagtctgcaagtggatattcagacctctttgaggccttcgttggaaacgggatttcttcatattatgctagacagaagaattctcagtaacttccttgtgttgtgtgtattcaactcacagagttgaactttcatttacacagagcagatttgaaacactctttttgaggaatttgcaaatggagaattcaagcgttttgaggccaaaggcagaaaaggaaatatcttcgtataaaaactagacagaatcattctcagaaactgctctgcgatgtgtgcattcaactctcagagtttaatttttcttttcattcagcagtttggaaacactctctttgtaaagtctgcacgtggatattttgaccacttagaggccttcgttggaaacgggttttattcctgtaagtctagacagaagaattcccagtaacttccttgtgttgtgtacattcaactcacagagttgaacgttcccttagacagagcagatttgaaacactctttttgtgcaattggcaagtggagatttcaagcgctttaaggtcaatggcagaaaaggaaatatcttcgtttcaaaactagacagaatgattctcagaaactcctttgtgatgtgtgcgttcaactcacagagtttaacctttcttttcatagagcagttgggaaacactctgtttgtaaagtctgcaagtggatattcagacctctttgacgccttcgttggaaacgggatttcttcatattctgctagacagaagaattctcagtaactttccttgtgttgtgtgtattcaactcacagagttgaacgatcctttacacagagcagacttgaaacactctttttgcggaatttgcaagtggagatttcagccgctttgaggtcaatggtagaataggaaatatcttcctatagaaactagacagagtgattctcagaaactcctttgtgatgtctgcgttcaactcacagagtttaacctttcttttcatagagcagttaggaaacactctgtttgtaaagtctgcaagtggatattcagacctccttgaggccttcgttggaaacgggatttcttcatattctgctatacagaggaattctcagtaacttccttgtgttgtgtgtattcaactgacagagttaaactttcatttagagagagcagatttgaaacactgtttttgtggaatttgcaagtggagatttcaagcgctttggggccaaaggcagaaaaggaaatatcttcgtataaaaactagacagaatcattctcagaaactgctctgcgatgtgtgcgttcaactctcagagtttaacttttcttttcattcagcagtttggaaacactctgtttgtaacgtctgcacgtgaataatttgaccacttagaggccttcgttggaaacgggtttttttcatgtaaggctagacagaagaattctcagtaacttccttgtgttgtgtgtattcaactcacagagttgaacgatcctttacacagagcagacttgtaacacgctttttgtggaatttgcaagtggagatttcagccgctttgaagtcaaatgtagaaaaggaaatatcttcctataaaaactagacagaatcattcccacaaactgcgttgtgatgtgttcgttcaactcacagagtttaacctttcttttcatagagcagttaggaaacagtctgtttgtcaattctgtaagtggatattctgacatcttgtggccttcgttggaaacgggatttcttcatattctgctagacagaagaattctcagtaacttccgcgtgttgtgtgtattcaactcacagagttgaacgatcctttacacagagcagacttgtaacactctatttggggaatttgcaagtggagatttcagccgctttgaagtcaaaggtagaaaaggaaatatcttcctataaaaactagacagaatgattctcagaaactcctttgtgatgtgtgcgttcaactcacagagtttaacctttcttttcatagagcagttaggaaacactctgtttgtaaagtctgcaaatggatattcagacctctctgaggccttcgttggaaacgggctttttcatataaggctagacagaagaattctcagtaacttccttgtgttgtgtgtattcaactgacagagttgaactttcatttagagagagcagatttgaaacactgtttttgtggaatttgcaagtggagatttcaagcgctttggggccaagggcagaaaaggaaatatcttcgtataaaaacaagacagaatcattctcagaaactgctgcgtgatgtgtgcgttcaactctcagagtttaacttttcttttcattcagcggtttggaaacactctgtttgtaaagtctgcacgtggacattttgaccacttagagtccttcgttggaaacgggtttttttcatgtaaggctagacagaagaattcccagaaacttccttgtgttgtgtgcattcaactcacagagttgaacgttcccttagacagagcagatttgaaacactctatttgtgcaatttgcaagtgtagatttcaagcgctttaaggtcaatggcagaaaaggaaatatcttcgtttcaaaactagacagaatcattcccacaaactgcgttgtgatgtgttcgttcaactcacagagtttaacctttcttttcatagagcagttaggaaacagtctgtttgtcaattctgtaagtggatattctgacatcttgtggccttcgttggaaacgggatttcttcatattctgctagacagaataattctcagtaacttccttgtgttgtgtgtattcaactcacagagttgaacgatcctttacatagagcagacttgaaacactctttttgtggaatttgcaagtggagatttcagccgctttgaggtcaatagtagaaaaggaaatatcttcgtagaaaaactagacagaatgattctcagaaactcctttgtgatgtgtgcgttcaactcacagtagtttaacttttcttttcatagagcagttaggaaacactctgtttgtaaagtctgcaagtggatattcagacctctttgaggccttcgttggaaacgggatttcttcatattatgctagacagaagaattcccagtaacttccttgtgttgtgtgtgttcaactcacagagttgaactttcatttacacagagcagatttgaaacactctttttgtggaatttgcaagtggagatttcaagcgctttgaggccaaaggcagaaaaggaaatatcttcgtataaaaactagacagaatcattttcagaaactgctctgcgatgtgtgcgttcaactctcagagtttgacttttcttttcattcagcagtttggaaacactctgtttgtaaagtctgcacgtggataatttgaccacttagaggccttcgtgggaaacgggtttttttcatgtaaggctagacagaagaattcccagtaacttccttgtgttgtgtgcattcaactcacagagttgaacgttcccttagacagagcagatttgaaacactctatttgtgcaatttgcaagtgtagatttcaagcgctttaaggtcaacggcagaaaaggaaatatcttcgtttcaaaactagacagaatcattcccacgaactacgttgtgatgtgttcgttcaactcacagagtttaacctttcttttcatagagcagttaggaaacagtctgtttgtaaattctgtaagtggatattctgacatcttgtggccttcgttggaaacgggatttcttcatattctgctagacagaagaattctcagtaacttccttgtgttgtgtgtattcaactcacagagttgaacgatcctttacacagagcagacttgaaacactctttgtgtggaatttgcaagtggagatttcagccgctttgagttcaatggtagaataggaaatatcttcctatagaaactagacagaatgattctcagaaactcctttgtgatgtgtgcgttcaactcacagagtttaacctttcttttcatagagcagttaggaaacactctgtttgtaaagtctgcaagtggatattcagacctccttgaggccttctttggaaacgggatttcttcatattatgctagacagaagaattctcagtaacttccttgtgttgtgtgtattcaactcacagagttgaacgatcctttacacagagcatacttgaaacactcttcttgtggaatttgcaagtggagatttcagccgctttgaggtcaactgtagaataggaaatatcttcctatagaaactagacagaaatgattctcagaaactcttttgtgatgtgtgcgttcaactcacagagtttaacctttctgttcatagagcagttaggaaacactctgtttgtaaagtctgcaagtggatattcagacctccttggggccttcgttggaaacgggatttcttcatattctgctagacagaagaattcccagtaacttccttgtgttgtgtacattcaactcacagagttgaacgttcccttagacagagcagatttgaaacactctttttgtgcaattggcaaatggagatttcaagcgctttaaggtcaatggcagaaaaggaaatatcttcgtttcaaaactagacagaatcattcccacaaactgcgttgtgatgtgttcgttcaactcacagagtttaacctttcttttcatagagcagttaggaaacagtctgtttgaaaattctgtaagtggatattctgacatcttgtggccttcgttggaaacgggatttcttcatattctgctagacagaagaattctcagtaccttccttgtgttgtgtgtattcaactcacagagttgaacgatcctttacacagagcagacttgaaacactctttttgtgaaatttgcaactggagatttaagccgctttgtggtcaatggtataataggaaatatcttcctatagaaactagacagaatgattctgagaaactcctttgtgatgtgtgcgttcaactcacagagtttaacctttcttttcatagagcagttaggaaacactctgtttgtaaagtctgcaagtggatattcagacctccttgaggccttcgttggaaacgggatttcttcatattatgctagacagaagaattctcagtaacttccttgtgttttgtgtattcaactcacagagttgaacgatcctttacacagagcagacttgaaacactctttttgtggaatttgcaagtggagatttcagccgctttgagttcaatggtagaataggaaatatcttcctatggaaactagacagaatcattctcagaaactgctgcgtgatgtgtgcgttcaactctcagagtttaacttttctttgcattcagcggtttggaaacactctgtttgtaaagtctgcacgtggatattttgaccacttagaggccttcgttggaaacgggtttttttcatgtaaggctagacagaagaattcccagtaacttccttgtgttgtgtgcattcaactcacagagttgaacgttcccttagacagagcagatttgaaacactctatttgtgcaatttgcaagtgtagatttcaagcgcattaaggtcaatggcagaaaaggaaatatcttcgtttcaaaattagacagaatcattcccacaaactgcgttgtgatgtgttcgttcaactcacagagtttaacctttctgttcatagagcagttaggaaacactctgtttgtaaagtctgtaagtagatattctgacatcttgtggccttcgttggaaacgggatttcttcatattctgctagacagaagaattctcagtaacttccttgtgttgtgtgtattcaactcacagagttgaacgatcctttacacagagcagacttgaaacactctttttgtggaatttgcaagtggagatttcagccgctttgaggtcaatggtagaaaaggaaactatcttcatataaagattagacagaatgattctcagaaactcctttgtgatgtgtgcgttcaactcacagagtttaacctttcttttcatagagcagttgggaaacactctgtttgtaaagtctgcaagtggatattcagacatccttgaggctttcgttggaaacgggatttcttcatattctgctagaaagaagaattctcagtaacttccttgtgttgtgtgtattcaactcacagagttgaacgatcctttacacagagcagacttgaaacactcttcttgcggaatttgcaagtggagatttcagccgctttgaggtcaatggtagaataggaaatatcttcctatagaaactagacagaatcattctcagaaactgctctgcgatgtgtgcgttcaactctcagagtttaacttttcttttcattcagcagtttggaaacactctgtttgtaaagtctgcacgtggatattttgaccacttagaggccttcgttggaaatgggtttttttcctgtaaggctagacagaagaattctcagcaacttccttgtgttgtgtgtattcaactcacagagttgaacgatcctttgagcagacttgagaaactctttttgtggaatttgcaagtggagatttcagccggtttgaggtcaatggtagaaaaggaaatatcttcgaataaaaactagacagaatgattctcagaaactcctttatgatgtgtgcgttcaactctcagagtttaaccttccttttcataaagcagttaggaaacactctgtttgtaaagtctgcaagtggataatcagacctctttgaggccttcgttggaaacgggattttttcatattctgctagacagaagaattctcagtaacttcctcgtgttgtgtgtattcaactcacagagttgaacgatcctttacacagagcagacttgaaacactctttttgtggaatttgcaaatggagatttcagccgctttgaggtcagtggttgaaaaggaaatatcttcatataaaaattagacagaatgattctcagaaacttctttgtgatgtgtgcgttcaactcacagagtttaacctttcttttcatagagcagttatgaaacactctgtttgtaaactctgcaagtggatattcagacctctttgaggccttcgttggaaacgggatttcttcatactgtgctagacagaagaattcccagtaacttccttgtgatgtgtgtgttcaactcacagagttcaactttcatttacacagagcagatttgaaacactctttttgtggaatttgcaagtggagatttcaagcgctttgaggccaaaggcagaaaaggaaatatcttcgtataaaaactacacagaatgattctcagaaactcctttgtgatgtgtgcgttcaactcacagagtttaacctttcttttcatagagcagttaggaaacactctgtttgtaaagtctgcaagtgatattcagacctctttgaggccttcgttggaaacgggtttttttcatataaggctagacagaagaattcccagtaacttccttgtgttgtgtacattcaactcacagagttgaaccgttcccttagacagagcagatttgaaacactctttttgtgcaattggcaagtggagatttcaagcgctttgaggtcaatggcagaaaaggaaatatcttcgtttcaaaactagacagaatgattctcagaaacttctttgtgatgtgtgcgttcaactcacacagtttaacctttcttttcatagagcagttaggaaacactctgtttgtaaactctgcaagtggatattcagacctctttgaggccttcgttggaaacgggatttctccatactgtgctagacagaagaattctcagtaacttccttgtgttgtgtgtattcaactcacagagttgaacgatcctttacacagagcggacttgaaacactcgttttgtggaatttgcaagtggagatttcagccgcgttgaggtcaatggtagaaaaggaaatatcttcgtataaaaactagacagaatgattctgaaaactcctttgtgatgtgtgcgttcaactcacacagtttaacctttcttttcatagagcagttaggaaacactctgtttgtaaagtctgcaagtggatattcagacctccttgaggccttcgttggaaacgggatttcttcatattatgctagacagaagaattctcagtaacttccttgtgttgtgtgtattaaactgacagagttgaactttcatttagagagagcagatttgaaacactgtttttgtggaatttgcaagtggagatttcaagcgctttggggccaaaggcagaaaaggaaatatcttcgtataaaaactagacagaatcattctcagaaactgctctgcgatgtgtgcgttcaactctcagagtttaacttttcttttcattcagcagtttggaaacattctgtttgtaaagtctgcacgtggatattttgaccacttagaggccttcgttggaaacgggtttttttcctgtaaggctagacagaagaattcccagtaacttccttgtgttgtgtacattcaactcacagagttgaacgttcccttagacagaacagatttgaaacactctttttgtgcaattggcaaatggagatttcaagcgctttgagatcaatggtagaaaaggaaatatcttcgtttcaaaactagacagaatcattcccacaaactgcgttgtgatgtgttcgttcaacctacagtgtttaacctttcttttcatagagcagttaggaaacagtctgtttgtaaattctgtaagtggatattctgacatcttgtggccttggttggaaacgggatttcttcatattctgctagacagaagaattctcagaatcttccttgtgttgtgtgtattcaactcacagagttgaacgatggtttacacagagcagatttgaaacactctttttgtggaatttgcaagtggagatttcagccgctttgaggtcaatggtagaaaaggaaatatcttcgtataaaaactagacagaatgattctcagaaacttcattgtgttgtgtgcgttcaactcacagagtttaacctttcttttcatagagcagttaggaaacactctgtttgtaaactctgcaagtggatattcagagctctttgaggccttcgttggaaacgggatttcttcatactgtgctagacagaagaattcccagtaacttccttgtgttgtgtgtgttcaactcacagagttgaactttgatttacacagagcagatttgaaacactctttttgtggaatttgcaagtggagatttcaagcgctttgaggccaaaggcagaaaaggaaatatcttcgtataaaaactagacagaatcattctcagacactgctctgcgatgtgtgcgttcaactctcagagtttaacttttcttttcattcagcagtttggaaacactctgtttgtaaagtctgcacgtggatattttgaccacttagaggccttcgttggaaacgggtttttttcctgtaaggctagacagaagaattcccagtaacttccttgtgttgtgtacattcaactcacagagttgaacgttcccttagacagagcagatttgaaacactctttttgtgcaattggcaaatggagatttcaagcgctttaaggtcaatggcagaaaaggaaatatcttcgtttcaaaactagacagaacgattctcagaaattcctttgtgatgtgtgcgttcaactcacagagtttaacctttcttttcatagagcagttaggaaacactctgtttgaaaagtctgcaagtggatattcagacctctttgaggccttcgttggaaacgggatttcttcatattctgctagacagaagaattctcagtaacttccttgtgttgtgtgtattcaactcacagagttgaacgatcgtttacacagagcagacttgaaacactctttttgtggaatttgcaagtggagatttcagccgctttgaggtcaatagtagaaaaggaaatatcttcggagaaaaactagacagaatgattctcagaaactcctttgtgatgtgtgtgttcaactcacagagtttaacctttcttttcatagagcagttaggaaacactctgtttgtaaagtctgcaagtggatattcagacctctttgaggccttcgttggaaacgggtttttttcatataaggctagacagaagaattcccagtaacttccttgtgttgtgtgtgttcaactcacagagttgaactttcatttacacagagcagatttgaaacactctttttgtggaatttgcaagtggagatttcaagcgctttgaggccaaaggcagaaaaggaaatatacttcgtataaaaactagacagaatcattctcagaaactgctctgcgatgtgtgcgttcaactctcagaagtttaacttttcttttcattcagcagtttggaaacactctgtttgtaaagtctgcacgtggataacttgaccacttagaggccttcgttggaaacgggtttttttcatgtaaggctagacagaagaattcccagtaacttccttgcgttgtgtacattcaactcacagagttgaacgttcccttagacagagcagatttgaaacactctttttgtgcaattggcaagtggagatttcaagcgctttaaggtcaatggcagaaaaggaaatatcttcgtttcaaaactagacagaatgattctcagaaactcctttgtgatgtgtgcgttcaactcacagagtttaacttttcttttcatagagcagtaaggaaacactctgtttgtaaagtctgcaagtggatattcagacctctttgaggccttcgttggaaacgggatttcttcatattatgctagacagaataattctcagtaacttccttgtgttgtgtgtattcaactcacagagttgaacgatcctttacagagagcagacttgaaacactctttttgtggaatttgcaagtggagatttcagccgctttgaggtcaatggtagaaaaggaaatatcttcgtataaagactagacagaatgattctcagaaactcctttgtgatgtgtgcgttcaactcacagagtttaacctttcttttcatagagcagttaggaaacactctgtttgtaaagtctgcaagtggatattcagacctccttgaggtcttcgttggaaacgggatttcttcatattctgctagacagaagaattctcagtaacttccttgtgttgtgtgtattcaactgacagagttgaactttcatttacagagagcagatttgaaacactgtttttgtggaatttgcaagtggagatttcaagcgctttggggccaaaggcagaaaaggaaatatcttcgtgtaaaaactagacagaatcattctcagaaactgctgcgtgatgtgtgctttcaactctcagagtttaacttttcttttcattcagcggtttggaaacactctgtttgtaaagtctgcacgtggatattttgaccacttagaggcctacgttggaaacgggtttttttcatgtaaggctagacagaagaattcccagtaacttccttgtgttgtgtgcattcaactcacagagttgaacgttcccttagacagagcagatttgaaacactctatttgtgcaatttgcaagtgtagatttcaagcgctttaaggtcaatggcagaaaaggaaatatcttcgtttcaaaactagacagaatcattcccacaaactgcgttgtgatatgttcgttcaactcacagagtttaacctttctgttcatagagcagttaggaaacactctgtttgtaaagtctgtaagtggatattctgacatcttgtggccttcgttggaaacgggatttcttcatattctgctagacagaagaattctcagtaacttccttgtgttgtgtgtattcaactcacagagttgaacgatcctttacacagagcggacttgaaacactctttttgtgaaatttgcaagtggagatttcagccgcgttgaggtcaatggtagaaaaggaaatatcttcgtataaaaactagacagaatgattctcataaactcctttgtgatgtgtgcgttcaactcacagagtttaacctttcttttcatagagcagttaggagacactctgtttgtaaagtctgcaagtggatattcagacctctttgaggccttcgttggaaaagggatttcttcatattatgctagacagaagaattctcagtaacttccttgtgttgtgtgtattcaactgacagagttgaactttcatttagagagagcagatttgaaacactgtttttgtggaatttgcaagtggagatttcaagcgctttggggccaaaggcagaaaaggaaatatcttcgtataaaaactagacagaatcattctcagaaaccgctctgtgatgtgtgcgttcaagtctcagagtttaacttttcttttcattcagcagtttggaaacactctgtttgtaaagtctgcacgtggatattttgacaacttagaggccttcgttggaaacgggttttttttcacgtaaggctagacagaagaattcccagtaacttccttgtgttgtgtacattcaactcacagagttgaacgttcccttagacagagcagatttgaaacactctttttgtgcaattggcaaatggagatttcaagcgctttaaggtcaatggcagaaaaggaaatatcttcgtttcaaaactagacagaatcattcccacaaactgcgttgtgatgtgttcggtcaactcacagagtttaacctttcttttcatagagcagttaggaaacagtctgtttgtaaattctgtaagtggatattctgacatcttgtggccttcgttggaaacgggatttcttcatattctgctagacagaagaattctcagtaacttccttgtgttgtgtgtattcaactcacagagttgaacgatcctttacactgagcagacttgaaacactctttttgtggaatttgcaagtggagatttcagccgctttgaggtcaatggtagaaaaggaaatatcttcgtataaagactagacagaatgattctcagaaactcctttgtgatgtgtgcgttcaactcacagagtttaacttttcttttcatagagcagttaggaaacactctgtttgtaaagtctgcaagtggatattcagacctctttgaggccttcgttggaaacgggatttcttcatattatgctagacagaataattctcagtaacttccttgtgttgtgtgtattccactcacagagttgaacgatcctttacggagagcagacttgaaacactctttttgtggaatttgcaagtggagatttcagccgctttgaggtcaatggtagaataggaaatatcttcctatggaaactagacagaatcattctcagaaactgctctgcgatgtgtgcgttcaactctcagagtttaacttttcttttcattcagcagtttggaaacactctgtttgtaaagtctgcacgtggatattttgaccacttagaggccttcgttggaaacgggtttttttcctgtaaggctagacagaagaattcccagtaacttccttgtgttgggtgcattcaactcacagagttgaacgttcccttagacagagcagatttgaaacactctatttgtgcaatttgcaagtgtagatttcaagcgctttaaggtcaatggcagaaaaggaaatatcttcgtttcaaaactagacagaatcgttcccacaaactgcgttgtgatgtgttcgttcaactcacagagtttaacctttctgttcatagagcagttaggaaacactctgtttgtaaagtctgtaagtggatattctgacatcttgtggccttcgttggaaacgggatttcttcatattctgctagacagaagaattctcagtaacttccttgtgttgtgtgtattcaactcacagagttgaatgatcctttacacagaacagtcttgaaacactctttttgtggaatttgcaagtggagatttcagccgctttgaggtcaatggtagaataggaaatatcttcctatagaaaatagacagaatgattctcagaaactcctttgtgatgtgtgcgttcaactcacacagtttaacctttcttttcatagagcagttaggaaacactctgtttgtaaagtctgcaagtggatattcagacctctttgaggccttcgttggaaacgggattttttcatattatgctagacagaagaattctcagtaacttccttgtgttgtgtgtattcaactgacagagttgaactttcatttagaccgagcagatttgaaacactctttttgtggaatttgcaagtggagatttcaagcgctttgaggccaaaggcagaaaaggaaatatcttcgtataaaaactagacagaatcattctcagaaactgctgcgtgatgtgtgcgttcaactctcagagtttaacttttcttttcattcagcggtttggaaacactctgtttgtaaagtctgcacgtggacattttgaccccttagaggccttcgttggaaacgggtttttttcatgtaaggctagacagaagaattcccagtaacttccttgtgttgtgtgcattcaactcacagagttgaacgttcccttagacagagcagatttgaaacactctatttgtgcaatttgcaagtgtagatttcaagcgctttaaggtcaacggcagaaaaggaaatatcttcgtttcaaaactagacagaatgattctcagaaactcctttgtgatgtgtgcgttcaactcacagagtttaacctttcttttcatagagtagttaggaaacactctgtttgtgaagtctgccagtggatattcagacctctttgaggccttcgttggaaacggggtttcttcatattatgctagacagaagaattctcaataacttccttgtgttgtgtgcattcaactcacagagttgaatgatcctttacacagagcagattagaaacactctttttgtggaatttgcaagtggagatttcagccgctttgaggtcaatggtagaaaaggaaatatcttcgtataaaaactagacagaatgattctcagaaactcctttgtgatgtgtgcgttcaactcacagagtttaacctttcttttcatagagcagttaggaaacactctgtttgtaaagtctgcaagtggatattcagacctcttagaggccttcgttggaaacgggatttcttcatactctagacagaagaattcccagtaacttccttgtgttgtgtgtgttcaactcacagagttgaactttcatttacacagaggagatttgaaacactctttttgtggaatttgcaaatggagatttcaagcgctttgaggccaaaggcagaaaaggaaatatcttcgtataaaaactagacagaatcattctcagaaactgctctgcgatgtgtgcgttcaactctcagagtttaacttttcttttcattcagcagtttggaaacactctgtttgtaaagtctgcacgtggatattttgaccacttagaggccttcgttggaaacgggtttttttcctgtaaggctagacagaagaattcccagtaacttccttgtgttgtgtgcattcaactcacagagttgaacgttcccttagacagagcagatttgaaacactctatttgtgcaatttgcaagtgtagttttcaagctctttaaggtcaacggcagaaaaggaaatatcttggtttcaaaactagacagaatcattcccacaaactgcgttgtgatgtgttcattcaactcacagagcttaacctttctgttcatagagcagttaggaaacactctgtttgtaaagtctgtaagtggatattctgacatcttgtggccttcgttggaaacgggatttcttcatattctgctagacagaagaattctcattaacttccttgtgttgtgtgtattcaactcacagagttgaacgatcctttacacagagcagacttgaaacattctttttgtggaatttgcaagtggagatttcagccgctttgaggtcaatggtagaataggaaatatcttcctatagaaactagacagaatgattctcagaaaatcttttgtgatgtgtgcgttcaactcacagagtttaacttttcttctcatagagcagttaggaaacactctgtttataaagtctgcaagtggatattcagacctctttgaggccttcgttggaaacgggatttcttcatattctgctagacagaagaattcccagtaacttccttgtgttgtgtgtgttcaactcacagagttgaactttgatttacagagcagatttgaaacactctttttgtggaatgtgcaagtggagatttcaagcgctgtgaggccaaaggcagaaaaggatatatcttcgtataaaaactagacagaatcattctcagaaactgctctgcgatgtgtgcgttcaactctcagagtttaacttttcttttcattcagcagtttggaaacactctgtttgtaaagtctgcacgtggatattttgaccacttagaggccttcgttggaaacgggtttttttcctgtaaggctagacagaagaattcccagtaacttccttgtgttgtgtgcattcaactcacagagttgaacgttcccttagacagagcagatttgaaacactctatttgtgcaatttgcaagtgtagatttcaagcgctttaaggtgaatggcagaaaaggaaatatcttcgtttcaaaactagacagaatgattctcagaaactcctttgtgatgtgtgcgttcaactcacagagtttaacctttcttttcatagagcagttaggaaacactctgtttgtaaagtctggaagtggatattcagacatccttgaggctttcgttggaaacgggatttcttcatattctgctagaaagaagaattctcagtaacttccttgtgttgtgtgtattcaactcacagagttgaacgatcctttacacagagcagacttgaaacactctttttgtggaatttgcaagtggagatttcagccgctttgagttcaatggtagaataggaaatatcttcctatagaaactagacagaatgattctcataaactcctttgtgatgtgtgcgttcaactcacagagtttaacctttcttttcatagagcagttaggaaacactctgtttgtaaagtctgcaagtggatattcagacctctttgaggccttcgttggaaacgggatttcttcatattatgctagacagaagaattctcagtaacttccttgtgttgtgtgtattcaactgacagagttgaagtttcattaagagagagcagatttgaaacactgtttttgtggaatttgcaagtggagatttcaagcgctttggggccaaaggcagaaaaggaaatatcttcgtataaaaactagacagaatcattctcagaaactgctgcgtgatgtgtgcgttcaactctcagagtttaacttttccttttcattcagcggtttggaaacactctgtttgtaaagtctgcacgtggatattttgaccacttagaggccttcgttggaaacgggtttttttcatgtaaggctagacagaagaattcccagtaacttccttgtgttgtgtacattcaactcacagagttgaacgttcccttagacagagcagatttgaaacactctttttgtgcaattggcaaatggagatttcaagcgctttaagttcaatggcagaaaaggaaatatcttcgtttcaaaactagacagaatcattcccacaaactgcgttgtgatgtgttcgttcaactcacagagtttaacctttcttttcatagagcacttaggaaacagtctgtttgtaaattctgtaagtggatattctgacatcttgtggccttcgttggaaacgggatttcttcatattctgctagacagaataattctcagtaacttccttgtgttctgtgtattcaacttacagagttgaacgatcctttacagagagcagacttgaaacactctttttgtggaatttgcaagtggagatttcagccgctttgaggtcaatggtagaaaaggaaatatcttcgtataaagactagacagaatgattctcagaaactcctttgtgatgtgtgcgttcaactcacagagttcaacttttcttttcatagagcagttaggaaacactctgtttgtaaagtctgcaagtggatattcagacctctttgaggccttcgttggaaacgggatttcttcatattctgcaagacagaagaattctcagtaacttccttgtgttctgtgtattcaactcacagagttgaacgatcctttacacagagcagacttgaaacactctttttgtggaatttgcaagtggagatttcagccgctttgaggtcaatggtagaaaaggaaatatcttcgtataaagactagacagaatcattctcagaaactgctctgcgatgtgtgcgttcaactctcagagtttaacttttcttttcattcagcagtttggaaacactctgtttgtacagtctgcacgtggataatttgaccacttagaggccttcgttggaaacgggtttttttcatgtaaggctagacagaagaattctcagtaacttccttgtgttgtgtgtattcaactcacagagttgaacgatcctttacacagagcagacttgtaacactctttttgtggaatttgcaagtggagatttcagccgctttgaagtcaaatgtagaaaaggaaatatcttcctataaacactagacagaatcattcccacaaactgcgttgtgatgtgttcgttcaactcacagagtttaacctttcttttcatagagcagttaggaaacagtctgtttgtcaattctgtaagtggatattctgacatcttgtggccttcgttggaaacgggatttcttcatattctgctagacagaagaattctcagaaacttccttgtgttgtgtgtattcaactcacagagttgaacgatcgtttacacagagcagacttgagacactctttttgtggaatttgcaagtggagatttcagccgctttgaggtcaatggtagaaaaggaaatatcttcatataaaaactagacagaatgattctcagaatcttctttgtgatgtgtgcgttcaactcacagagtttaacctttcttttcatagagcagttaggaaacactctgtttgtaaattctgcaagtggatattcagacctcattgaggccttcgttggaaacgggatttcttcatactatgctagacagaagaattctcagtaacttccttgtgttgtgtgtattcaactgacagagttgaactttcatttagagagagcagatttgaaacactgtttttgtggaatttgcaagtggagatttcaagcgctttggggccaaaggcagaaaaggaaatatcttcgtataaaaactagacagaatcattctcagaaactgctctgcgatgtgtgcgttcaactctcagagtttaacttttcttttcattcagcagtttggaaacactctgtttgtaaagtctgcacgtgtatattttgaccacttagaggccttcgttggaaacgggtttttttcctgtaaggctagacagaagaattcccagtaacttccttgtgttgtgtacattcaactcacagagttgaacgttcccttagacagagcagatttgaaacactctttttgtgcaattggcaaatggagatttcaagcgctttaaggtcaatggcagaaatggaaatatcttcgtttcaaaactagacagaatcattcccacaaactgcgtagtgatgtgttcgttcaactcacagagtttaacctttcttttcatagagcagttaggaaacagtctgtttgtcaattctgtaagtggatattctgacatcttgtggccttcgttggaaacgggatttcttcatattctgctagacagaagaattcccagtaacttccttttgttgtgtacattcaactcacagagttgaacgttcccttagacagagcagacttgtaacactctttttgtggaatttgcaagtggagatttcagccgctttgaagtcaaaggtagaaaaggaaatatcttcctataaaaactagacagaatgattctcagaaactcctttgtgatgtgtgcgttcaactcacagagtttaacctttcttttcatagagcagttaggaaacactctgtttgtaaagtctgcaagtggatattcagacctctttgaggccttcgttggaaacgggtttttttcatataaggctagacagaagaattcccagtaacttccttgtgttgtgtgtgttcaactcacagagttgaactttcatttacccagaacagatttgaaacactctttttgtggaatttgcaagtggagatttcaagcactttgaggccaaaggcagaaaaggaaatatcttcgtttcaaaactagacagaatcattctcagaaactgctgcgtgatgtgtgcgttcaactctcagagtttaacttttcttttcattcagtggtttggaaacactctgtttgtaaagtctgcacgtggatattttgaccacttagaggccttcgttggaaacgggtttttttcatgtaaggctagacagaagaattcccagtaacttccttgtgttgtgtacattcaactcacagagttgaacgttcccttagacagagcagatttgaaacactctttttgtgcaattggcaagtggagatttcaagcgctttaaggtcaatggcagaaaaggaaatatcttcgtttcaaaactagacagaatgattctcagaaactcctttgtgatgtgtgcgttcaactcacagagttcaacctttcttttcatagagcagttgggaaacactctgtttgtaaagtctgtaagtggatattcagacttctttgaggccttcgttggaagcggggtttcttcatattctgctagacagaagaattctcagaaacttccttgtgttgtgtgttttcaactcacagagttgaacgatcctttacacagagcagacttgaaacactccttttgtggaatttgcaagtggagatttcagccgctttgaggtcaatggtagaataggaaatatcttcctatagaaagtagacagaatgattctcagaaactcctttgtgatgtgtgcgttcaactcacagagttcaacctttcttttcatagaacagttgggaaacactctgtttgtaaagtctgcaagtggatattcagacatccttgaggctttcgttggaaacgggatttcttcatattctgctagaaagaagaattctcagtaacttccttgtgttgtgtgtattcaactgacagagttgaactttcatttagagagagcagatttgaaacactgtttttgtggtatttgcaagtggagatttcaagcgctttggggccaaaggcagaaaaggaaatatcttcgtataaaactagacagaatcattctcagaaactgctctgcgatgtgtgcgttcagctctcagagtttaacttttcttttcattcagcagtttggaaacactctgtttgtaaagtctgcacgtggatattttgaccacttagaggccttcgatggaaatgggtttttgtcatgtaaggctagacagaagaattcccagtaacttccttgtgttgtgtacattcaactcacagagttgaacgttcccttagacagagcagatttgaaacactctttttgtgcaattggcaagtggagatttcaagcgcttaaggtcaatggcagaaaaggaaatatcttcgtttcaaaactagacagaatcattcccacaaactccgttgtgatgtgttcgttcaactcacagagtttaacctttcttttcatagagcagttaggaaacagtctgtttgtcaattctgtaagtggatattctgacatcttgtggccttcgttggaaacgggatttcttcacattctgctagacagaagaattctcagaaacttccttgtgttgtgtgttttcaagtcacagagttgaacgatcctttacacagagcagacttgaaacactctttttgtggaatttgccagtggagatttcagccgctttgaggtcaatggtagaaaaggaaatatcttcgtataaaaagtagacagaatgattctcagaaactcctttgtgatgtgggcgttcaactcacagagtttaacctttcttttcatagagcagttaggaaacactctgtttgtaaagtctccacgaggatacttggacttctttgaggccttcgttggaaacgggtttttttcatgtaaggctggacagaagaattctcagtaacttccttgtgttgtgtgtattcaactgacagagttgaactttcatttagagagagcagatttcaaacactgtttttttggaatttgcaagtggagatttcaagcgctttggggtcaaaggcagaaaaggaaatatcttcgtataaaaactagacagaatcattctcagaaaccgctctgtgatgtgtgcgttcaactctcagagtttaacttttcttttcattcagcagtttggaaacactctgtttgtaaagtctccacgtggatattttgaccacttagaagccttcgtttgaaacgggtttttttttcatgtaaggctagacagaagaattcccagtaacttccttgtgttgtgtacattcaactcacagagttgaacgttaccttagacagagcagatttgaaacactctttttgtgcaattggcaaatggagatttcaagcgctttaaggtcaatggcagaaaaggaaatatcttcgtttcaaaactagacagaatgattctcagaaactcctctgtgatgtgtgcgttcaactctcagagtttaacttttcttttcattcagcagtttggaaacactctgtttgtaaagtctgcacgtggatattttgaccacttagaggccttcgttggaaaagggatttcttcatatgatgctagacagaagaattctcagtaacttccttgtgttgtgtgtattcaactcacagagttgaacggatcctttacacagagcagacttgaaacactctttttgtggaatttgcaagtggagatttcagccgctttgaggtcaatggtagaataggaaatatcttcctatagaaactagacagaatgattctcagaaactcctttgtgatgtgtgtgttcaactcacagagtttaacctttcttttcatagagcagttaggaaacgctctgtttgtaaagtctgcaagtggatattcagacctcgttgagaccttcgttggaaacgggatttcttcatattctgctagacagaagaatcctcagtaacttccttgtgttgtgtttattcaactcacagagttgaatgatcctttacacagagcagacttgaaacactctttttgtggaatttgcaagtggagatttcagccgctttgtggtcaatggtagaaaaggaaatatcttcgtataaagactggacagaaatgattctcagaaacttctttgtgatgtgtgcgttcaactcacagagtttaacctttcttttcatagagcagttaggaaacactctgtttgtaaactctgcaagtcgatattcagacctctttgaggccttcgttggaaacgggatttcttcatactatgctagacagaagaattcccagtaacttccttgtgttgtgtgcattcaactcacagagttgaacgttcccttagacagagcagatttgaaacactctatttgtgcaatttgcaattgtagttttcaagctctttaaggtcaacggcagaaaaggaaatatcttcgtttcaaaactagacagaatgattctcataaactcctttgtgatgtgtgcgttcaactcacagagtttaacctttcttttcattgagcagttaggaaacactctgtttgtaaagtctgcaagtggatattcagacctccttgaggccttcattggaaacgggatttcttcatattctgctagacagaagaattctcagtaacttccttgtgttgtgtgtattcaactcacagagttgaacgatcctttacacagagcagacttgaaacactctttttgtggaatttgcaattggagatttcagccgctttgaggtcaatagtagaaaaggtaatatcttcgtagaaaaactagacagaatgattctcagaaactcctttgtgatgtgtgtgttcaactcacagagtttaacctttcttttcatagagcagttagtaaacactctgtttataaagtctgcaagtggatattcagacccctttgaggccttcgttggaaacgggatttcttcatattatgctagacagaagaattcccagtaacttccttgtgttgtgtgtgttcaactcacagagttgaactttcatttacacagagcagatttgaaacactctttttgtggaatttacaaatggaggtttcaagcgctttgaggccaaaggcagaaaaggaaatatcttcgtataaaaactagacagaatcattctcagaaactgctctgcgatgtgtgcgttcaactctcagagtttaacttttcttttcattcagcagtttggaaacactctgtttgtaaagtctgcacgtggataacttgaccacttagaggccttcgttggaaacgggtttttttcctgtaaggctagacagaagaattctcagtaacttccttgtcttgtgtgtattcaactcacagagttgaacgatcctttacacagagcagacttgtaacactctttttgtggaatttgcaagtggagatttcagccgctttgaagtcaaaggtagaaaaggaaatatcttcctataaaaactagacagaatcattctaagaaactgctctgtgatgtgtgtgttcaactctcagagtttaacttttcttttccttcagcagtttggaaacactctgtttgtaaagtctgcacgtggataatttgaccacttagaggccttcgttggaaacgggttttttcatgtaaggctagacagaagaattctcagtaacttccttgtgttgtgtgtattcaactcacagagttgaccgatcctttacacagagcagacttgtaacactctttttttgtggaatttgcaagtggagatttcagccgctttgaagtcaatggtaaaaaaggaaatatcttcgtttcaaaactagacagaatgattctcagaaactcctttgtgatgtgtgcgttcaactcaaagagtttaacctttcttttcatagagcagttaggaaacactctgtttgtaaagtctgcaagtggatattcagacctctttgaggccttctttggaaacgggtttttttcatataaggctagacagaagaattcccagtaacttccttgtgttgtgtgtgttcaactcacagagttgaactttcatttacacagagcagatttgaaacactctttttgtggaatttgcaagtggagatttcaagcgctttgaggccaaaggcagaaaaggaaatatcttcgtttcaaaactagacagaatcattctcagaaactgctgcgtgatgtgtgcgttcaactctcagagtttaacttttcttttcattcagcggtttggaaacactctgtttgtaaagtctgcacgtggacattttgaccacttagaggccttcgttggaaacgggtttttttcatgtgaggctagacagaagaattcccagtaacttccttgtgttgtgtgcattcaactcacagagttgaacgttcccttagacagagcagatttgaaacactctatttgtgcaatttgcaagtgtagatttcaagcgctttaaggtcaatggcagaaaaggaaatatcttcgtttcaaaactagacagaatgattctcagtaaactccttagtgatgtgtgcgttcaactcacagagtttaacctttctgttcatagagcagttaggaaacactctgtttgtaaagtatgcaagtggatatacagacctccttgaggccttcgttggaaacgggatttcttcatattctgctagacagaagaattctcagtaacttccttgtgttgtgtgtattcaactcacagagttgaacgatcctttacacagagcagacttgaaacactctttttgtggaatttgcaagtggagatttcagccgctttgaggtcaatagtagaaaaggaaatatcttcgtagaaaaactagacagaatgattctcagaaactcctttgtgatgtgtgcgttcaactcacagagtttaacctttcttttcatagagcagttaggaaacactctgtttgtaaagtctgcaagtggatattcagacctccttgaggccttggttggaaacgggatttcttcatattatgctagacagaagaattcccagtaacttccttgtgttgtgtgtgttcaacttacagagttgaactttcatttacacagagcagatttgaaacactctttttgtggaatttgcaagtggagatttcaagcgctttgaggccaaaggcagaaaaggaaatatcttcgtataaaaactagacagaatcattctcagaaactgctctgcgatgtgtgcgttcaactctcagtgtttaacttttcttttcattcagcagtttggaaacactctgtttgtaaagtctgcacgtggatattttgaccacttagaggccttcgttggaaacgggttcttttcctgtaaggctagacagaagaattcccagtaacttccttgtgttgtgtacattcaactcacagagttgaacgttcccttagacagagcagatttgaaacactctttttgtgcaattggcaagtggagatatcaagcgctttaaggtcaatggcagaaaaggaaatatcttcgtttcaaaactagacagaatcattcccacaaactgcgttgtgatgtgttcgttcatctcacagagtttaacctttcttttcatagagcagttaggaaacactctgtttgtaaattctgtaagtggatattctgacatcttgtggccttcgttggaaacgggatttcttcatattctgctagacagaagaattctcagtaacttccttctgttgtgtgtattcaactcacagagttgaacgatcctttacacagagcagacctgaaacactctttttgtggaatttgcaagtggagatttcagccgctttgaggtcaatagtagaaaaggaaatatcttcgtagaaaaactaggcagaatgattctcagatactcctttgtgatgtgtgcgttcaactcacagagtttaacctttcttttcatggagcagttaggaaacactctgtttgtaaagtctgcaaggggatattcagacctctttgaggctttcgttggaaacgggatttcttcatattctgctagacagannnnnnnnnnnnnnnnnnnnnnnnnnnnnnnnnnnnnnnnnnnnnnnnnnnnnnnnnnnnnnnnnnnnnnnnnnnnnnnnnnnnnnnnnnnnnnnnnnnnnnnnnnnnnnnnnnnnnnnnnnnnnnnnnnnnnnnnnnnnnnnnnnnnnnnnnnnnnnnnnnnnnnnnnnnnnnnnnnnnnnnnnnnnnnnnnnnnnnnnnnnnnnnnnnnnnnnnnnnnnnnnnnnnnnnnnnnnnnnnnnnnnnnnnnnnnnnnnnnnnnnnnnnnnnnnnnnnnnnnnnnnnnnnnnnnnnnnnnnnnnnnnnnnnnnnnnnnnnnnnnnnnnnnnnnnnnnnnnnnnnnnnnnnnnnnnnnnnnnnnnnnnnnnnnnnnnnnnnnnnnnnnnnnnnnnnnnnnnnnnnnnnnnnnnnnnnnnnnnnnnnnnnnnnnnnnnnnnnnnnnnnnnnnnnnnnnnnnnnnnnnnnnnnnnnnnnnnnnnnnnnnnnnnnnnnnnnnnnnnnnnnnnnnnnnnnnnnnnnnnnnnnnnnnnnnnnnnnnnnnnnnnnnnnnnnnnnnnnnnnnnnnnnnnnnnnnnnnnnnnnnnnnnnnnnnnnnnnnnnnnnnnnnnnnnnnnnnnnnnnnnnnnnnnnnnnnnnnnnnnnnnnnnnnnnnnnnnnnnnnnnnnnnnnnnnnnnnnnnnnnnnnnnnnnnnnnnnnnnnnnnnnnnnnnnnnnnnnnnnnnnnnnnnnnnnnnnnnnnnnnnnnnnnnnnnnnnnnnnnnnnnnnnnnnnnnnnnnnnnnnnnnnnnnnnnnnnnnnnnnnnnnnnnnnnnnnnnnnnnnnnnnnnnnnnnnnnnnnnnnnnnnnnnnnnnnnnnnnnnnnnnnnnnnnnnnnnnnnnnnnnnnnnnnnnnnnnnnnnnnnnnnnnnnnnnnnnnnnnnnnnnnnnnnnnnnnnnnnnnnnnnnnnnnnnnnnnnnnnnnnnnnnnnnnnnnnnnnnnnnnnnnnnnnnnnnnnnnnnnnnnnnnnnnnnnnnnnnnnnnnnnnnnnnnnnnnnnnnnnnnnnnnnnnnnnnnnnnnnnnnnnnnnnnnnnnnnnnnnnnnnnnnnnnnnnnnnnnnnnnnnnnnnnnnnnnnnnnnnnnnnnnnnnnnnnnnnnnnnnnnnnnnnnnnnnnnnnnnnnnnnnnnnnnnnnnnnnnnnnnnnnnnnnnnnnnnnnnnnnnnnnnnnnnnnnnnnnnnnnnnnnnnnnnnnnnnnnnnnnnnnnnnnnnnnnnnnnnnnnnnnnnnnnnnnnnnnnnnnnnnnnnnnnnnnnnnnnnnnnnnnnnnnnnnnnnnnnnnnnnnnnnnnnnnnnnnnnnnnnnnnnnnnnnnnnnnnnnnnnnnnnnnnnnnnnnnnnnnnnnnnnnnnnnnnnnnnnnnnnnnnnnnnnnnnnnnnnnnnnnnnnnnnnnnnnnnnnnnnnnnnnnnnnnnnnnnnnnnnnnnnnnnnnnnnnnnnnnnnnnnnnnnnnnnnnnnnnnnnnnnnnnnnnnnnnnnnnnnnnnnnnnnnnnnnnnnnnnnnnnnnnnnnnnnnnnnnnnnnnnnnnnnnnnnnnnnnnnnnnnnnnnnnnnnnnnnnnnnnnnnnnnnnnnnnnnnnnnnnnnnnnnnnnnnnnnnnnnnnnnnnnnnnnnnnnnnnnnnnnnnnnnnnnnnnnnnnnnnnnnnnnnnnnnnnnnnnnnnnnnnnnnnnnnnnnnnnnnnnnnnnnnnnnnnnnnnnnnnnnnnnnnnnnnnnnnnnnnnnnnnnnnnnnnnnnnnnnnnnnnnnnnnnnnnnnnnnnnnnnnnnnnnnnnnnnnnnnnnnnnnnnnnnnnnnnnnnnnnnnnnnnnnnnnnnnnnnnnnnnnnnnnnnnnnnnnnnnnnnnnnnnnnnnnnnnnnnnnnnnnnnnnnnnnnnnnnnnnnnnnnnnnnnnnnnnnnnnnnnnnnnnnnnnnnnnnnnnnnnnnnnnnnnnnnnnnnnnnnnnnnnnnnnnnnnnnnnnnnnnnnnnnnnnnnnnnnnnnnnnnnnnnnnnnnnnnnnnnnnnnnnnnnnnnnnnnnnnnnnnnnnnnnnnnnnnnnnnnnnnnnnnnnnnnnnnnnnnnnnnnnnnnnnnnnnnnnnnnnnnnnnnnnnnnnnnnnnnnnnnnnnnnnnnnnnnnnnnnnnnnnnnnnnnnnnnnnnnnnnnnnnnnnnnnnnnnnnnnnnnnnnnnnnnnnnnnnnnnnnnnnnnnnnnnnnnnnnnnnnnnnnnnnnnnnnnnnnnnnnnnnnnnnnnnnnnnnnnnnnnnnnnnnnnnnnnnnnnnnnnnnnnnnnnnnnnnnnnnnnnnnnnnnnnnnnnnnnnnnnnnnnnnnnnnnnnnnnnnnnnnnnnnnnnnnnnnnnnnnnnnnnnnnnnnnnnnnnnnnnnnnnnnnnnnnnnnnnnnnnnnnnnnnnnnnnnnnnnnnnnnnnnnnnnnnnnnnnnnnnnnnnnnnnnnnnnnnnnnnnnnnnnnnnnnnnnnnnnnnnnnnnnnnnnnnnnnnnnnnnnnnnnnnnnnnnnnnnnnnnnnnnnnnnnnnnnnnnnnnnnnnnnnnnnnnnnnnnnnnnnnnnnnnnnnnnnnnnnnnnnnnnnnnnnnnnnnnnnnnnnnnnnnnnnnnnnnnnnnnnnnnnnnnnnnnnnnnnnnnnnnnnnnnnnnnnnnnnnnnnnnnnnnnnnnnnnnnnnnnnnnnnnnnnnnnnnnnnnnnnnnnnnnnnnnnnnnnnnnnnnnnnnnnnnnnnnnnnnnnnnnnnnnnnnnnnnnnnnnnnnnnnnnnnnnnnnnnnnnnnnnnnnnnnnnnnnnnnnnnnnnnnnnnnnnnnnnnnnnnnnnnnnnnnnnnnnnnnnnnnnnnnnnnnnnnnnnnnnnnnnnnnnnnnnnnnnnnnnnnnnnnnnnnnnnnnnnnnnnnnnnnnnnnnnnnnnnnnnnnnnnnnnnnnnnnnnnnnnnnnnnnnnnnnnnnnnnnnnnnnnnnnnnnnnnnnnnnnnnnnnnnnnnnnnnnnnnnnnnnnnnnnnnnnnnnnnnnnnnnnnnnnnnnnnnnnnnnnnnnnnnnnnnnnnnnnnnnnnnnnnnnnnnnnnnnnnnnnnnnnnnnnnnnnnnnnnnnnnnnnnnnnnnnnnnnnnnnnnnnnnnnnnnnnnnnnnnnnnnnnnnnnnnnnnnnnnnnnnnnnnnnnnnnnnnnnnnnnnnnnnnnnnnnnnnnnnnnnnnnnnnnnnnnnnnnnnnnnnnnnnnnnnnnnnnnnnnnnnnnnnnnnnnnnnnnnnnnnnnnnnnnnnnnnnnnnnnnnnnnnnnnnnnnnnnnnnnnnnnnnnnnnnnnnnnnnnnnnnnnnnnnnnnnnnnnnnnnnnnnnnnnnnnnnnnnnnnnnnnnnnnnnnnnnnnnnnnnnnnnnnnnnnnnnnnnnnnnnnnnnnnnnnnnnnnnnnnnnnnnnnnnnnnnnnnnnnnnnnnnnnnnnnnnnnnnnnnnnnnnnnnnnnnnnnnnnnnnnnnnnnnnnnnnnnnnnnnnnnnnnnnnnnnnnnnnnnnnnnnnnnnnnnnnnnnnnnnnnnnnnnnnnnnnnnnnnnnnnnnnnnnnnnnnnnnnnnnnnnnnnnnnnnnnnnnnnnnnnnnnnnnnnnnnnnnnnnnnnnnnnnnnnnnnnnnnnnnnnnnnnnnnnnnnnnnnnnnnnnnnnnnnnnnnnnnnnnnnnnnnnnnnnnnnnnnnnnnnnnnnnnnnnnnnnnnnnnnnnnnnnnnnnnnnnnnnnnnnnnnnnnnnnnnnnnnnnnnnnnnnnnnnnnnnnnnnnnnnnnnnnnnnnnnnnnnnnnnnnnnnnnnnnnnnnnnnnnnnnnnnnnnnnnnnnnnnnnnnnnnnnnnnnnnnnnnnnnnnnnnnnnnnnnnnnnnnnnnnnnnnnnnnnnnnnnnnnnnnnnnnnnnnnnnnnnnnnnnnnnnnnnnnnnnnnnnnnnnnnnnnnnnnnnnnnnnnnnnnnnnnnnnnnnnnnnnnnnnnnnnnnnnnnnnnnnnnnnnnnnnnnnnnnnnnnnnnnnnnnnnnnnnnnnnnnnnnnnnnnnnnnnnnnnnnnnnnnnnnnnnnnnnnnnnnnnnnnnnnnnnnnnnnnnnnnnnnnnnnnnnnnnnnnnnnnnnnnnnnnnnnnnnnnnnnnnnnnnnnnnnnnnnnnnnnnnnnnnnnnnnnnnnnnnnnnnnnnnnnnnnnnnnnnnnnnnnnnnnnnnnnnnnnnnnnnnnnnnnnnnnnnnnnnnnnnnnnnnnnnnnnnnnnnnnnnnnnnnnnnnnnnnnnnnnnnnnnnnnnnnnnnnnnnnnnnnnnnnnnnnnnnnnnnnnnnnnnnnnnnnnnnnnnnnnnnnnnnnnnnnnnnnnnnnnnnnnnnnnnnnnnnnnnnnnnnnnnnnnnnnnnnnnnnnnnnnnnnnnnnnnnnnnnnnnnnnnnnnnnnnnnnnnnnnnnnnnnnnnnnnnnnnnnnnnnnnnnnnnnnnnnnnnnnnnnnnnnnnnnnnnnnnnnnnnnnnnnnnnnnnnnnnnnnnnnnnnnnnnnnnnnnnnnnnnnnnnnnnnnnnnnnnnnnnnnnnnnnnnnnnnnnnnnnnnnnnnnnnnnnnnnnnnnnnnnnnnnnnnnnnnnnnnnnnnnnnnnnnnnnnnnnnnnnnnnnnnnnnnnnnnnnnnnnnnnnnnnnnnnnnnnnnnnnnnnnnnnnnnnnnnnnnnnnnnnnnnnnnnnnnnnnnnnnnnnnnnnnnnnnnnnnnnnnnnnnnnnnnnnnnnnnnnnnnnnnnnnnnnnnnnnnnnnnnnnnnnnnnnnnnnnnnnnnnnnnnnnnnnnnnnnnnnnnnnnnnnnnnnnnnnnnnnnnnnnnnnnnnnnnnnnnnnnnnnnnnnnnnnnnnnnnnnnnnnnnnnnnnnnnnnnnnnnnnnnnnnnnnnnnnnnnnnnnnnnnnnnnnnnnnnnnnnnnnnnnnnnnnnnnnnnnnnnnnnnnnnnnnnnnnnnnnnnnnnnnnnnnnnnnnnnnnnnnnnnnnnnnnnnnnnnnnnnnnnnnnnnnnnnnnnnnnnnnnnnnnnnnnnnnnnnnnnnnnnnnnnnnnnnnnnnnnnnnnnnnnnnnnnnnnnnnnnnnnnnnnnnnnnnnnnnnnnnnnnnnnnnnnnnnnnnnnnnnnnnnnnnnnnnnnnnnnnnnnnnnnnnnnnnnnnnnnnnnnnnnnnnnnnnnnnnnnnnnnnnnnnnnnnnnnnnnnnnnnnnnnnnnnnnnnnnnnnnnnnnnnnnnnnnnnnnnnnnnnnnnnnnnnnnnnnnnnnnnnnnnnnnnnnnnnnnnnnnnnnnnnnnnnnnnnnnnnnnnnnnnnnnnnnnnnnnnnnnnnnnnnnnnnnnnnnnnnnnnnnnnnnnnnnnnnnnnnnnnnnnnnnnnnnnnnnnnnnnnnnnnnnnnnnnnnnnnnnnnnnnnnnnnnnnnnnnnnnnnnnnnnnnnnnnnnnnnnnnnnnnnnnnnnnnnnnnnnnnnnnnnnnnnnnnnnnnnnnnnnnnnnnnnnnnnnnnnnnnnnnnnnnnnnnnnnnnnnnnnnnnnnnnnnnnnnnnnnnnnnnnnnnnnnnnnnnnnnnnnnnnnnnnnnnnnnnnnnnnnnnnnnnnnnnnnnnnnnnnnnnnnnnnnnnnnnnnnnnnnnnnnnnnnnnnnnnnnnnnnnnnnnnnnnnnnnnnnnnnnnnnnnnnnnnnnnnnnnnnnnnnnnnnnnnnnnnnnnnnnnnnnnnnnnnnnnnnnnnnnnnnnnnnnnnnnnnnnnnnnnnnnnnnnnnnnnnnnnnnnnnnnnnnnnnnnnnnnnnnnnnnnnnnnnnnnnnnnnnnnnnnnnnnnnnnnnnnnnnnnnnnnnnnnnnnnnnnnnnnnnnnnnnnnnnnnnnnnnnnnnnnnnnnnnnnnnnnnnnnnnnnnnnnnnnnnnnnnnnnnnnnnnnnnnnnnnnnnnnnnnnnnnnnnnnnnnnnnnnnnnnnnnnnnnnnnnnnnnnnnnnnnnnnnnnnnnnnnnnnnnnnnnnnnnnnnnnnnnnnnnnnnnnnnnnnnnnnnnnnnnnnnnnnnnnnnnnnnnnnnnnnnnnnnnnnnnnnnnnnnnnnnnnnnnnnnnnnnnnnnnnnnnnnnnnnnnnnnnnnnnnnnnnnnnnnnnnnnnnnnnnnnnnnnnnnnnnnnnnnnnnnnnnnnnnnnnnnnnnnnnnnnnnnnnnnnnnnnnnnnnnnnnnnnnnnnnnnnnnnnnnnnnnnnnnnnnnnnnnnnnnnnnnnnnnnnnnnnnnnnnnnnnnnnnnnnnnnnnnnnnnnnnnnnnnnnnnnnnnnnnnnnnnnnnnnnnnnnnnnnnnnnnnnnnnnnnnnnnnnnnnnnnnnnnnnnnnnnnnnnnnnnnnnnnnnnnnnnnnnnnnnnnnnnnnnnnnnnnnnnnnnnnnnnnnnnnnnnnnnnnnnnnnnnnnnnnnnnnnnnnnnnnnnnnnnnnnnnnnnnnnnnnnnnnnnnnnnnnnnnnnnnnnnnnnnnnnnnnnnnnnnnnnnnnnnnnnnnnnnnnnnnnnnnnnnnnnnnnnnnnnnnnnnnnnnnnnnnnnnnnnnnnnnnnnnnnnnnnnnnnnnnnnnnnnnnnnnnnnnnnnnnnnnnnnnnnnnnnnnnnnnnnnnnnnnnnnnnnnnnnnnnnnnnnnnnnnnnnnnnnnnnnnnnnnnnnnnnnnnnnnnnnnnnnnnnnnnnnnnnnnnnnnnnnnnnnnnnnnnnnnnnnnnnnnnnnnnnnnnnnnnnnnnnnnnnnnnnnnnnnnnnnnnnnnnnnnnnnnnnnnnnnnnnnnnnnnnnnnnnnnnnnnnnnnnnnnnnnnnnnnnnnnnnnnnnnnnnnnnnnnnnnnnnnnnnnnnnnnnnnnnnnnnnnnnnnnnnnnnnnnnnnnnnnnnnnnnnnnnnnnnnnnnnnnnnnnnnnnnnnnnnnnnnnnnnnnnnnnnnnnnnnnnnnnnnnnnnnnnnnnnnnnnnnnnnnnnnnnnnnnnnnnnnnnnnnnnnnnnnnnnnnnnnnnnnnnnnnnnnnnnnnnnnnnnnnnnnnnnnnnnnnnnnnnnnnnnnnnnnnnnnnnnnnnnnnnnnnnnnnnnnnnnnnnnnnnnnnnnnnnnnnnnnnnnnnnnnnnnnnnnnnnnnnnnnnnnnnnnnnnnnnnnnnnnnnnnnnnnnnnnnnnnnnnnnnnnnnnnnnnnnnnnnnnnnnnnnnnnnnnnnnnnnnnnnnnnnnnnnnnnnnnnnnnnnnnnnnnnnnnnnnnnnnnnnnnnnnnnnnnnnnnnnnnnnnnnnnnnnnnnnnnnnnnnnnnnnnnnnnnnnnnnnnnnnnnnnnnnnnnnnnnnnnnnnnnnnnnnnnnnnnnnnnnnnnnnnnnnnnnnnnnnnnnnnnnnnnnnnnnnnnnnnnnnnnnnnnnnnnnnnnnnnnnnnnnnnnnnnnnnnnnnnnnnnnnnnnnnnnnnnnnnnnnnnnnnnnnnnnnnnnnnnnnnnnnnnnnnnnnnnnnnnnnnnnnnnnnnnnnnnnnnnnnnnnnnnnnnnnnnnnnnnnnnnnnnnnnnnnnnnnnnnnnnnnnnnnnnnnnnnnnnnnnnnnnnnnnnnnnnnnnnnnnnnnnnnnnnnnnnnnnnnnnnnnnnnnnnnnnnnnnnnnnnnnnnnnnnnnnnnnnnnnnnnnnnnnnnnnnnnnnnnnnnnnnnnnnnnnnnnnnnnnnnnnnnnnnnnnnnnnnnnnnnnnnnnnnnnnnnnnnnnnnnnnnnnnnnnnnnnnnnnnnnnnnnnnnnnnnnnnnnnnnnnnnnnnnnnnnnnnnnnnnnnnnnnnnnnnnnnnnnnnnnnnnnnnnnnnnnnnnnnnnnnnnnnnnnnnnnnnnnnnnnnnnnnnnnnnnnnnnnnnnnnnnnnnnnnnnnnnnnnnnnnnnnnnnnnnnnnnnnnnnnnnnnnnnnnnnnnnnnnnnnnnnnnnnnnnnnnnnnnnnnnnnnnnnnnnnnnnnnnnnnnnnnnnnnnnnnnnnnnnnnnnnnnnnnnnnnnnnnnnnnnnnnnnnnnnnnnnnnnnnnnnnnnnnnnnnnnnnnnnnnnnnnnnnnnnnnnnnnnnnnnnnnnnnnnnnnnnnnnnnnnnnnnnnnnnnnnnnnnnnnnnnnnnnnnnnnnnnnnnnnnnnnnnnnnnnnnnnnnnnnnnnnnnnnnnnnnnnnnnnnnnnnnnnnnnnnnnnnnnnnnnnnnnnnnnnnnnnnnnnnnnnnnnnnnnnnnnnnnnnnnnnnnnnnnnnnnnnnnnnnnnnnnnnnnnnnnnnnnnnnnnnnnnnnnnnnnnnnnnnnnnnnnnnnnnnnnnnnnnnnnnnnnnnnnnnnnnnnnnnnnnnnnnnnnnnnnnnnnnnnnnnnnnnnnnnnnnnnnnnnnnnnnnnnnnnnnnnnnnnnnnnnnnnnnnnnnnnnnnnnnnnnnnnnnnnnnnnnnnnnnnnnnnnnnnnnnnnnnnnnnnnnnnnnnnnnnnnnnnnnnnnnnnnnnnnnnnnnnnnnnnnnnnnnnnnnnnnnnnnnnnnnnnnnnnnnnnnnnnnnnnnnnnnnnnnnnnnnnnnnnnnnnnnnnnnnnnnnnnnnnnnnnnnnnnnnnnnnnnnnnnnnnnnnnnnnnnnnnnnnnnnnnnnnnnnnnnnnnnnnnnnnnnnnnnnnnnnnnnnnnnnnnnnnnnnnnnnnnnnnnnnnnnnnnnnnnnnnnnnnnnnnnnnnnnnnnnnnnnnnnnnnnnnnnnnnnnnnnnnnnnnnnnnnnnnnnnnnnnnnnnnnnnnnnnnnnnnnnnnnnnnnnnnnnnnnnnnnnnnnnnnnnnnnnnnnnnnnnnnnnnnnnnnnnnnnnnnnnnnnnnnnnnnnnnnnnnnnnnnnnnnnnnnnnnnnnnnnnnnnnnnnnnnnnnnnnnnnnnnnnnnnnnnnnnnnnnnnnnnnnnnnnnnnnnnnnnnnnnnnnnnnnnnnnnnnnnnnnnnnnnnnnnnnnnnnnnnnnnnnnnnnnnnnnnnnnnnnnnnnnnnnnnnnnnnnnnnnnnnnnnnnnnnnnnnnnnnnnnnnnnnnnnnnnnnnnnnnnnnnnnnnnnnnnnnnnnnnnnnnnnnnnnnnnnnnnnnnnnnnnnnnnnnnnnnnnnnnnnnnnnnnnnnnnnnnnnnnnnnnnnnnnnnnnnnnnnnnnnnnnnnnnnnnnnnnnnnnnnnnnnnnnnnnnnnnnnnnnnnnnnnnnnnnnnnnnnnnnnnnnnnnnnnnnnnnnnnnnnnnnnnnnnnnnnnnnnnnnnnnnnnnnnnnnnnnnnnnnnnnnnnnnnnnnnnnnnnnnnnnnnnnnnnnnnnnnnnnnnnnnnnnnnnnnnnnnnnnnnnnnnnnnnnnnnnnnnnnnnnnnnnnnnnnnnnnnnnnnnnnnnnnnnnnnnnnnnnnnnnnnnnnnnnnnnnnnnnnnnnnnnnnnnnnnnnnnnnnnnnnnnnnnnnnnnnnnnnnnnnnnnnnnnnnnnnnnnnnnnnnnnnnnnnnnnnnnnnnnnnnnnnnnnnnnnnnnnnnnnnnnnnnnnnnnnnnnnnnnnnnnnnnnnnnnnnnnnnnnnnnnnnnnnnnnnnnnnnnnnnnnnnnnnnnnnnnnnnnnnnnnnnnnnnnnnnnnnnnnnnnnnnnnnnnnnnnnnnnnnnnnnnnnnnnnnnnnnnnnnnnnnnnnnnnnnnnnnnnnnnnnnnnnnnnnnnnnnnnnnnnnnnnnnnnnnnnnnnnnnnnnnnnnnnnnnnnnnnnnnnnnnnnnnnnnnnnnnnnnnnnnnnnnnnnnnnnnnnnnnnnnnnnnnnnnnnnnnnnnnnnnnnnnnnnnnnnnnnnnnnnnnnnnnnnnnnnnnnnnnnnnnnnnnnnnnnnnnnnnnnnnnnnnnnnnnnnnnnnnnnnnnnnnnnnnnnnnnnnnnnnnnnnnnnnnnnnnnnnnnnnnnnnnnnnnnnnnnnnnnnnnnnnnnnnnnnnnnnnnnnnnnnnnnnnnnnnnnnnnnnnnnnnnnnnnnnnnnnnnnnnnnnnnnnnnnnnnnnnnnnnnnnnnnnnnnnnnnnnnnnnnnnnnnnnnnnnnnnnnnnnnnnnnnnnnnnnnnnnnnnnnnnnnnnnnnnnnnnnnnnnnnnnnnnnnnnnnnnnnnnnnnnnnnnnnnnnnnnnnnnnnnnnnnnnnnnnnnnnnnnnnnnnnnnnnnnnnnnnnnnnnnnnnnnnnnnnnnnnnnnnnnnnnnnnnnnnnnnnnnnnnnnnnnnnnnnnnnnnnnnnnnnnnnnnnnnnnnnnnnnnnnnnnnnnnnnnnnnnnnnnnnnnnnnnnnnnnnnnnnnnnnnnnnnnnnnnnnnnnnnnnnnnnnnnnnnnnnnnnnnnnnnnnnnnnnnnnnnnnnnnnnnnnnnnnnnnnnnnnnnnnnnnnnnnnnnnnnnnnnnnnnnnnnnnnnnnnnnnnnnnnnnnnnnnnnnnnnnnnnnnnnnnnnnnnnnnnnnnnnnnnnnnnnnnnnnnnnnnnnnnnnnnnnnnnnnnnnnnnnnnnnnnnnnnnnnnnnnnnnnnnnnnnnnnnnnnnnnnnnnnnnnnnnnnnnnnnnnnnnnnnnnnnnnnnnnnnnnnnnnnnnnnnnnnnnnnnnnnnnnnnnnnnnnnnnnnnnnnnnnnnnnnnnnnnnnnnnnnnnnnnnnnnnnnnnnnnnnnnnnnnnnnnnnnnnnnnnnnnnnnnnnnnnnnnnnnnnnnnnnnnnnnnnnnnnnnnnnnnnnnnnnnnnnnnnnnnnnnnnnnnnnnnnnnnnnnnnnnnnnnnnnnnnnnnnnnnnnnnnnnnnnnnnnnnnnnnnnnnnnnnnnnnnnnnnnnnnnnnnnnnnnnnnnnnnnnnnnnnnnnnnnnnnnnnnnnnnnnnnnnnnnnnnnnnnnnnnnnnnnnnnnnnnnnnnnnnnnnnnnnnnnnnnnnnnnnnnnnnnnnnnnnnnnnnnnnnnnnnnnnnnnnnnnnnnnnnnnnnnnnnnnnnnnnnnnnnnnnnnnnnnnnnnnnnnnnnnnnnnnnnnnnnnnnnnnnnnnnnnnnnnnnnnnnnnnnnnnnnnnnnnnnnnnnnnnnnnnnnnnnnnnnnnnnnnnnnnnnnnnnnnnnnnnnnnnnnnnnnnnnnnnnnnnnnnnnnnnnnnnnnnnnnnnnnnnnnnnnnnnnnnnnnnnnnnnnnnnnnnnnnnnnnnnnnnnnnnnnnnnnnnnnnnnnnnnnnnnnnnnnnnnnnnnnnnnnnnnnnnnnnnnnnnnnnnnnnnnnnnnnnnnnnnnnnnnnnnnnnnnnnnnnnnnnnnnnnnnnnnnnnnnnnnnnnnnnnnnnnnnnnnnnnnnnnnnnnnnnnnnnnnnnnnnnnnnnnnnnnnnnnnnnnnnnnnnnnnnnnnnnnnnnnnnnnnnnnnnnnnnnnnnnnnnnnnnnnnnnnnnnnnnnnnnnnnnnnnnnnnnnnnnnnnnnnnnnnnnnnnnnnnnnnnnnnnnnnnnnnnnnnnnnnnnnnnnnnnnnnnnnnnnnnnnnnnnnnnnnnnnnnnnnnnnnnnnnnnnnnnnnnnnnnnnnnnnnnnnnnnnnnnnnnnnnnnnnnnnnnnnnnnnnnnnnnnnnnnnnnnnnnnnnnnnnnnnnnnnnnnnnnnnnnnnnnnnnnnnnnnnnnnnnnnnnnnnnnnnnnnnnnnnnnnnnnnnnnnnnnnnnnnnnnnnnnnnnnnnnnnnnnnnnnnnnnnnnnnnnnnnnnnnnnnnnnnnnnnnnnnnnnnnnnnnnnnnnnnnnnnnnnnnnnnnnnnnnnnnnnnnnnnnnnnnnnnnnnnnnnnnnnnnnnnnnnnnnnnnnnnnnnnnnnnnnnnnnnnnnnnnnnnnnnnnnnnnnnnnnnnnnnnnnnnnnnnnnnnnnnnnnnnnnnnnnnnnnnnnnnnnnnnnnnnnnnnnnnnnnnnnnnnnnnnnnnnnnnnnnnnnnnnnnnnnnnnnnnnnnnnnnnnnnnnnnnnnnnnnnnnnnnnnnnnnnnnnnnnnnnnnnnnnnnnnnnnnnnnnnnnnnnnnnnnnnnnnnnnnnnnnnnnnnnnnnnnnnnnnnnnnnnnnnnnnnnnnnnnnnnnnnnnnnnnnnnnnnnnnnnnnnnnnnnnnnnnnnnnnnnnnnnnnnnnnnnnnnnnnnnnnnnnnnnnnnnnnnnnnnnnnnnnnnnnnnnnnnnnnnnnnnnnnnnnnnnnnnnnnnnnnnnnnnnnnnnnnnnnnnnnnnnnnnnnnnnnnnnnnnnnnnnnnnnnnnnnnnnnnnnnnnnnnnnnnnnnnnnnnnnnnnnnnnnnnnnnnnnnnnnnnnnnnnnnnnnnnnnnnnnnnnnnnnnnnnnnnnnnnnnnnnnnnnnnnnnnnnnnnnnnnnnnnnnnnnnnnnnnnnnnnnnnnnnnnnnnnnnnnnnnnnnnnnnnnnnnnnnnnnnnnnnnnnnnnnnnnnnnnnnnnnnnnnnnnnnnnnnnnnnnnnnnnnnnnnnnnnnnnnnnnnnnnnnnnnnnnnnnnnnnnnnnnnnnnnnnnnnnnnnnnnnnnnnnnnnnnnnnnnnnnnnnnnnnnnnnnnnnnnnnnnnnnnnnnnnnnnnnnnnnnnnnnnnnnnnnnnnnnnnnnnnnnnnnnnnnnnnnnnnnnnnnnnnnnnnnnnnnnnnnnnnnnnnnnnnnnnnnnnnnnnnnnnnnnnnnnnnnnnnnnnnnnnnnnnnnnnnnnnnnnnnnnnnnnnnnnnnnnnnnnnnnnnnnnnnnnnnnnnnnnnnnnnnnnnnnnnnnnnnnnnnnnnnnnnnnnnnnnnnnnnnnnnnnnnnnnnnnnnnnnnnnnnnnnnnnnnnnnnnnnnnnnnnnnnnnnnnnnnnnnnnnnnnnnnnnnnnnnnnnnnnnnnnnnnnnnnnnnnnnnnnnnnnnnnnnnnnnnnnnnnnnnnnnnnnnnnnnnnnnnnnnnnnnnnnnnnnnnnnnnnnnnnnnnnnnnnnnnnnnnnnnnnnnnnnnnnnnnnnnnnnnnnnnnnnnnnnnnnnnnnnnnnnnnnnnnnnnnnnnnnnnnnnnnnnnnnnnnnnnnnnnnnnnnnnnnnnnnnnnnnnnnnnnnnnnnnnnnnnnnnnnnnnnnnnnnnnnnnnnnnnnnnnnnnnnnnnnnnnnnnnnnnnnnnnnnnnnnnnnnnnnnnnnnnnnnnnnnnnnnnnnnnnnnnnnnnnnnnnnnnnnnnnnnnnnnnnnnnnnnnnnnnnnnnnnnnnnnnnnnnnnnnnnnnnnnnnnnnnnnnnnnnnnnnnnnnnnnnnnnnnnnnnnnnnnnnnnnnnnnnnnnnnnnnnnnnnnnnnnnnnnnnnnnnnnnnnnnnnnnnnnnnnnnnnnnnnnnnnnnnnnnnnnnnnnnnnnnnnnnnnnnnnnnnnnnnnnnnnnnnnnnnnnnnnnnnnnnnnnnnnnnnnnnnnnnnnnnnnnnnnnnnnnnnnnnnnnnnnnnnnnnnnnnnnnnnnnnnnnnnnnnnnnnnnnnnnnnnnnnnnnnnnnnnnnnnnnnnnnnnnnnnnnnnnnnnnnnnnnnnnnnnnnnnnnnnnnnnnnnnnnnnnnnnnnnnnnnnnnnnnnnnnnnnnnnnnnnnnnnnnnnnnnnnnnnnnnnnnnnnnnnnnnnnnnnnnnnnnnnnnnnnnnnnnnnnnnnnnnnnnnnnnnnnnnnnnnnnnnnnnnnnnnnnnnnnnnnnnnnnnnnnnnnnnnnnnnnnnnnnnnnnnnnnnnnnnnnnnnnnnnnnnnnnnnnnnnnnnnnnnnnnnnnnnnnnnnnnnnnnnnnnnnnnnnnnnnnnnnnnnnnnnnnnnnnnnnnnnnnnnnnnnnnnnnnnnnnnnnnnnnnnnnnnnnnnnnnnnnnnnnnnnnnnnnnnnnnnnnnnnnnnnnnnnnnnnnnnnnnnnnnnnnnnnnnnnnnnnnnnnnnnnnnnnnnnnnnnnnnnnnnnnnnnnnnnnnnnnnnnnnnnnnnnnnnnnnnnnnnnnnnnnnnnnnnnnnnnnnnnnnnnnnnnnnnnnnnnnnnnnnnnnnnnnnnnnnnnnnnnnnnnnnnnnnnnnnnnnnnnnnnnnnnnnnnnnnnnnnnnnnnnnnnnnnnnnnnnnnnnnnnnnnnnnnnnnnnnnnnnnnnnnnnnnnnnnnnnnnnnnnnnnnnnnnnnnnnnnnnnnnnnnnnnnnnnnnnnnnnnnnnnnnnnnnnnnnnnnnnnnnnnnnnnnnnnnnnnnnnnnnnnnnnnnnnnnnnnnnnnnnnnnnnnnnnnnnnnnnnnnnnnnnnnnnnnnnnnnnnnnnnnnnnnnnnnnnnnnnnnnnnnnnnnnnnnnnnnnnnnnnnnnnnnnnnnnnnnnnnnnnnnnnnnnnnnnnnnnnnnnnnnnnnnnnnnnnnnnnnnnnnnnnnnnnnnnnnnnnnnnnnnnnnnnnnnnnnnnnnnnnnnnnnnnnnnnnnnnnnnnnnnnnnnnnnnnnnnnnnnnnnnnnnnnnnnnnnnnnnnnnnnnnnnnnnnnnnnnnnnnnnnnnnnnnnnnnnnnnnnnnnnnnnnnnnnnnnnnnnnnnnnnnnnnnnnnnnnnnnnnnnnnnnnnnnnnnnnnnnnnnnnnnnnnnnnnnnnnnnnnnnnnnnnnnnnnnnnnnnnnnnnnnnnnnnnnnnnnnnnnnnnnnnnnnnnnnnnnnnnnnnnnnnnnnnnnnnnnnnnnnnnnnnnnnnnnnnnnnnnnnnnnnnnnnnnnnnnnnnnnnnnnnnnnnnnnnnnnnnnnnnnnnnnnnnnnnnnnnnnnnnnnnnnnnnnnnnnnnnnnnnnnnnnnnnnnnnnnnnnnnnnnnnnnnnnnnnnnnnnnnnnnnnnnnnnnnnnnnnnnnnnnnnnnnnnnnnnnnnnnnnnnnnnnnnnnnnnnnnnnnnnnnnnnnnnnnnnnnnnnnnnnnnnnnnnnnnnnnnnnnnnnnnnnnnnnnnnnnnnnnnnnnnnnnnnnnnnnnnnnnnnnnnnnnnnnnnnnnnnnnnnnnnnnnnnnnnnnnnnnnnnnnnnnnnnnnnnnnnnnnnnnnnnnnnnnnnnnnnnnnnnnnnnnnnnnnnnnnnnnnnnnnnnnnnnnnnnnnnnnnnnnnnnnnnnnnnnnnnnnnnnnnnnnnnnnnnnnnnnnnnnnnnnnnnnnnnnnnnnnnnnnnnnnnnnnnnnnnnnnnnnnnnnnnnnnnnnnnnnnnnnnnnnnnnnnnnnnnnnnnnnnnnnnnnnnnnnnnnnnnnnnnnnnnnnnnnnnnnnnnnnnnnnnnnnnnnnnnnnnnnnnnnnnnnnnnnnnnnnnnnnnnnnnnnnnnnnnnnnnnnnnnnnnnnnnnnnnnnnnnnnnnnnnnnnnnnnnnnnnnnnnnnnnnnnnnnnnnnnnnnnnnnnnnnnnnnnnnnnnnnnnnnnnnnnnnnnnnnnnnnnnnnnnnnnnnnnnnnnnnnnnnnnnnnnnnnnnnnnnnnnnnnnnnnnnnnnnnnnnnnnnnnnnnnnnnnnnnnnnnnnnnnnnnnnnnnnnnnnnnnnnnnnnnnnnnnnnnnnnnnnnnnnnnnnnnnnnnnnnnnnnnnnnnnnnnnnnnnnnnnnnnnnnnnnnnnnnnnnnnnnnnnnnnnnnnnnnnnnnnnnnnnnnnnnnnnnnnnnnnnnnnnnnnnnnnnnnnnnnnnnnnnnnnnnnnnnnnnnnnnnnnnnnnnnnnnnnnnnnnnnnnnnnnnnnnnnnnnnnnnnnnnnnnnnnnnnnnnnnnnnnnnnnnnnnnnnnnnnnnnnnnnnnnnnnnnnnnnnnnnnnnnnnnnnnnnnnnnnnnnnnnnnnnnnnnnnnnnnnnnnnnnnnnnnnnnnnnnnnnnnnnnnnnnnnnnnnnnnnnnnnnnnnnnnnnnnnnnnnnnnnnnnnnnnnnnnnnnnnnnnnnnnnnnnnnnnnnnnnnnnnnnnnnnnnnnnnnnnnnnnnnnnnnnnnnnnnnnnnnnnnnnnnnnnnnnnnnnnnnnnnnnnnnnnnnnnnnnnnnnnnnnnnnnnnnnnnnnnnnnnnnnnnnnnnnnnnnnnnnnnnnnnnnnnnnnnnnnnnnnnnnnnnnnnnnnnnnnnnnnnnnnnnnnnnnnnnnnnnnnnnnnnnnnnnnnnnnnnnnnnnnnnnnnnnnnnnnnnnnnnnnnnnnnnnnnnnnnnnnnnnnnnnnnnnnnnnnnnnnnnnnnnnnnnnnnnnnnnnnnnnnnnnnnnnnnnnnnnnnnnnnnnnnnnnnnnnnnnnnnnnnnnnnnnnnnnnnnnnnnnnnnnnnnnnnnnnnnnnnnnnnnnnnnnnnnnnnnnnnnnnnnnnnnnnnnnnnnnnnnnnnnnnnnnnnnnnnnnnnnnnnnnnnnnnnnnnnnnnnnnnnnnnnnnnnnnnnnnnnnnnnnnnnnnnnnnnnnnnnnnnnnnnnnnnnnnnnnnnnnnnnnnnnnnnnnnnnnnnnnnnnnnnnnnnnnnnnnnnnnnnnnnnnnnnnnnnnnnnnnnnnnnnnnnnnnnnnnnnnnnnnnnnnnnnnnnnnnnnnnnnnnnnnnnnnnnnnnnnnnnnnnnnnnnnnnnnnnnnnnnnnnnnnnnnnnnnnnnnnnnnnnnnnnnnnnnnnnnnnnnnnnnnnnnnnnnnnnnnnnnnnnnnnnnnnnnnnnnnnnnnnnnnnnnnnnnnnnnnnnnnnnnnnnnnnnnnnnnnnnnnnnnnnnnnnnnnnnnnnnnnnnnnnnnnnnnnnnnnnnnnnnnnnnnnnnnnnnnnnnnnnnnnnnnnnnnnnnnnnnnnnnnnnnnnnnnnnnnnnnnnnnnnnnnnnnnnnnnnnnnnnnnnnnnnnnnnnnnnnnnnnnnnnnnnnnnnnnnnnnnnnnnnnnnnnnnnnnnnnnnnnnnnnnnnnnnnnnnnnnnnnnnnnnnnnnnnnnnnnnnnnnnnnnnnnnnnnnnnnnnnnnnnnnnnnnnnnnnnnnnnnnnnnnnnnnnnnnnnnnnnnnnnnnnnnnnnnnnnnnnnnnnnnnnnnnnnnnnnnnnnnnnnnnnnnnnnnnnnnnnnnnnnnnnnnnnnnnnnnnnnnnnnnnnnnnnnnnnnnnnnnnnnnnnnnnnnnnnnnnnnnnnnnnnnnnnnnnnnnnnnnnnnnnnnnnnnnnnnnnnnnnnnnnnnnnnnnnnnnnnnnnnnnnnnnnnnnnnnnnnnnnnnnnnnnnnnnnnnnnnnnnnnnnnnnnnnnnnnnnnnnnnnnnnnnnnnnnnnnnnnnnnnnnnnnnnnnnnnnnnnnnnnnnnnnnnnnnnnnnnnnnnnnnnnnnnnnnnnnnnnnnnnnnnnnnnnnnnnnnnnnnnnnnnnnnnnnnnnnnnnnnnnnnnnnnnnnnnnnnnnnnnnnnnnnnnnnnnnnnnnnnnnnnnnnnnnnnnnnnnnnnnnnnnnnnnnnnnnnnnnnnnnnnnnnnnnnnnnnnnnnnnnnnnnnnnnnnnnnnnnnnnnnnnnnnnnnnnnnnnnnnnnnnnnnnnnnnnnnnnnnnnnnnnnnnnnnnnnnnnnnnnnnnnnnnnnnnnnnnnnnnnnnnnnnnnnnnnnnnnnnnnnnnnnnnnnnnnnnnnnnnnnnnnnnnnnnnnnnnnnnnnnnnnnnnnnnnnnnnnnnnnnnnnnnnnnnnnnnnnnnnnnnnnnnnnnnnnnnnnnnnnnnnnnnnnnnnnnnnnnnnnnnnnnnnnnnnnnnnnnnnnnnnnnnnnnnnnnnnnnnnnnnnnnnnnnnnnnnnnnnnnnnnnnnnnnnnnnnnnnnnnnnnnnnnnnnnnnnnnnnnnnnnnnnnnnnnnnnnnnnnnnnnnnnnnnnnnnnnnnnnnnnnnnnnnnnnnnnnnnnnnnnnnnnnnnnnnnnnnnnnnnnnnnnnnnnnnnnnnnnnnnnnnnnnnnnnnnnnnnnnnnnnnnnnnnnnnnnnnnnnnnnnnnnnnnnnnnnnnnnnnnnnnnnnnnnnnnnnnnnnnnnnnnnnnnnnnnnnnnnnnnnnnnnnnnnnnnnnnnnnnnnnnnnnnnnnnnnnnnnnnnnnnnnnnnnnnnnnnnnnnnnnnnnnnnnnnnnnnnnnnnnnnnnnnnnnnnnnnnnnnnnnnnnnnnnnnnnnnnnnnnnnnnnnnnnnnnnnnnnnnnnnnnnnnnnnnnnnnnnnnnnnnnnnnnnnnnnnnnnnnnnnnnnnnnnnnnnnnnnnnnnnnnnnnnnnnnnnnnnnnnnnnnnnnnnnnnnnnnnnnnnnnnnnnnnnnnnnnnnnnnnnnnnnnnnnnnnnnnnnnnnnnnnnnnnnnnnnnnnnnnnnnnnnnnnnnnnnnnnnnnnnnnnnnnnnnnnnnnnnnnnnnnnnnnnnnnnnnnnnnnnnnnnnnnnnnnnnnnnnnnnnnnnnnnnnnnnnnnnnnnnnnnnnnnnnnnnnnnnnnnnnnnnnnnnnnnnnnnnnnnnnnnnnnnnnnnnnnnnnnnnnnnnnnnnnnnnnnnnnnnnnnnnnnnnnnnnnnnnnnnnnnnnnnnnnnnnnnnnnnnnnnnnnnnnnnnnnnnnnnnnnnnnnnnnnnnnnnnnnnnnnnnnnnnnnnnnnnnnnnnnnnnnnnnnnnnnnnnnnnnnnnnnnnnnnnnnnnnnnnnnnnnnnnnnnnnnnnnnnnnnnnnnnnnnnnnnnnnnnnnnnnnnnnnnnnnnnnnnnnnnnnnnnnnnnnnnnnnnnnnnnnnnnnnnnnnnnnnnnnnnnnnnnnnnnnnnnnnnnnnnnnnnnnnnnnnnnnnnnnnnnnnnnnnnnnnnnnnnnnnnnnnnnnnnnnnnnnnnnnnnnnnnnnnnnnnnnnnnnnnnnnnnnnnnnnnnnnnnnnnnnnnnnnnnnnnnnnnnnnnnnnnnnnnnnnnnnnnnnnnnnnnnnnnnnnnnnnnnnnnnnnnnnnnnnnnnnnnnnnnnnnnnnnnnnnnnnnnnnnnnnnnnnnnnnnnnnnnnnnnnnnnnnnnnnnnnnnnnnnnnnnnnnnnnnnnnnnnnnnnnnnnnnnnnnnnnnnnnnnnnnnnnnnnnnnnnnnnnnnnnnnnnnnnnnnnnnnnnnnnnnnnnnnnnnnnnnnnnnnnnnnnnnnnnnnnnnnnnnnnnnnnnnnnnnnnnnnnnnnnnnnnnnnnnnnnnnnnnnnnnnnnnnnnnnnnnnnnnnnnnnnnnnnnnnnnnnnnnnnnnnnnnnnnnnnnnnnnnnnnnnnnnnnnnnnnnnnnnnnnnnnnnnnnnnnnnnnnnnnnnnnnnnnnnnnnnnnnnnnnnnnnnnnnnnnnnnnnnnnnnnnnnnnnnnnnnnnnnnnnnnnnnnnnnnnnnnnnnnnnnnnnnnnnnnnnnnnnnnnnnnnnnnnnnnnnnnnnnnnnnnnnnnnnnnnnnnnnnnnnnnnnnnnnnnnnnnnnnnnnnnnnnnnnnnnnnnnnnnnnnnnnnnnnnnnnnnnnnnnnnnnnnnnnnnnnnnnnnnnnnnnnnnnnnnnnnnnnnnnnnnnnnnnnnnnnnnnnnnnnnnnnnnnnnnnnnnnnnnnnnnnnnnnnnnnnnnnnnnnnnnnnnnnnnnnnnnnnnnnnnnnnnnnnnnnnnnnnnnnnnnnnnnnnnnnnnnnnnnnnnnnnnnnnnnnnnnnnnnnnnnnnnnnnnnnnnnnnnnnnnnnnnnnnnnnnnnnnnnnnnnnnnnnnnnnnnnnnnnnnnnnnnnnnnnnnnnnnnnnnnnnnnnnnnnnnnnnnnnnnnnnnnnnnnnnnnnnnnnnnnnnnnnnnnnnnnnnnnnnnnnnnnnnnnnnnnnnnnnnnnnnnnnnnnnnnnnnnnnnnnnnnnnnnnnnnnnnnnnnnnnnnnnnnnnnnnnnnnnnnnnnnnnnnnnnnnnnnnnnnnnnnnnnnnnnnnnnnnnnnnnnnnnnnnnnnnnnnnnnnnnnnnnnnnnnnnnnnnnnnnnnnnnnnnnnnnnnnnnnnnnnnnnnnnnnnnnnnnnnnnnnnnnnnnnnnnnnnnnnnnnnnnnnnnnnnnnnnnnnnnnnnnnnnnnnnnnnnnnnnnnnnnnnnnnnnnnnnnnnnnnnnnnnnnnnnnnnnnnnnnnnnnnnnnnnnnnnnnnnnnnnnnnnnnnnnnnnnnnnnnnnnnnnnnnnnnnnnnnnnnnnnnnnnnnnnnnnnnnnnnnnnnnnnnnnnnnnnnnnnnnnnnnnnnnnnnnnnnnnnnnnnnnnnnnnnnnnnnnnnnnnnnnnnnnnnnnnnnnnnnnnnnnnnnnnnnnnnnnnnnnnnnnnnnnnnnnnnnnnnnnnnnnnnnnnnnnnnnnnnnnnnnnnnnnnnnnnnnnnnnnnnnnnnnnnnnnnnnnnnnnnnnnnnnnnnnnnnnnnnnnnnnnnnnnnnnnnnnnnnnnnnnnnnnnnnnnnnnnnnnnnnnnnnnnnnnnnnnnnnnnnnnnnnnnnnnnnnnnnnnnnnnnnnnnnnnnnnnnnnnnnnnnnnnnnnnnnnnnnnnnnnnnnnnnnnnnnnnnnnnnnnnnnnnnnnnnnnnnnnnnnnnnnnnnnnnnnnnnnnnnnnnnnnnnnnnnnnnnnnnnnnnnnnnnnnnnnnnnnnnnnnnnnnnnnnnnnnnnnnnnnnnnnnnnnnnnnnnnnnnnnnnnnnnnnnnnnnnnnnnnnnnnnnnnnnnnnnnnnnnnnnnnnnnnnnnnnnnnnnnnnnnnnnnnnnnnnnnnnnnnnnnnnnnnnnnnnnnnnnnnnnnnnnnnnnnnnnnnnnnnnnnnnnnnnnnnnnnnnnnnnnnnnnnnnnnnnnnnnnnnnnnnnnnnnnnnnnnnnnnnnnnnnnnnnnnnnnnnnnnnnnnnnnnnnnnnnnnnnnnnnnnnnnnnnnnnnnnnnnnnnnnnnnnnnnnnnnnnnnnnnnnnnnnnnnnnnnnnnnnnnnnnnnnnnnnnnnnnnnnnnnnnnnnnnnnnnnnnnnnnnnnnnnnnnnnnnnnnnnnnnnnnnnnnnnnnnnnnnnnnnnnnnnnnnnnnnnnnnnnnnnnnnnnnnnnnnnnnnnnnnnnnnnnnnnnnnnnnnnnnnnnnnnnnnnnnnnnnnnnnnnnnnnnnnnnnnnnnnnnnnnnnnnnnnnnnnnnnnnnnnnnnnnnnnnnnnnnnnnnnnnnnnnnnnnnnnnnnnnnnnnnnnnnnnnnnnnnnnnnnnnnnnnnnnnnnnnnnnnnnnnnnnnnnnnnnnnnnnnnnnnnnnnnnnnnnnnnnnnnnnnnnnnnnnnnnnnnnnnnnnnnnnnnnnnnnnnnnnnnnnnnnnnnnnnnnnnnnnnnnnnnnnnnnnnnnnnnnnnnnnnnnnnnnnnnnnnnnnnnnnnnnnnnnnnnnnnnnnnnnnnnnnnnnnnnnnnnnnnnnnnnnnnnnnnnnnnnnnnnnnnnnnnnnnnnnnnnnnnnnnnnnnnnnnnnnnnnnnnnnnnnnnnnnnnnnnnnnnnnnnnnnnnnnnnnnnnnnnnnnnnnnnnnnnnnnnnnnnnnnnnnnnnnnnnnnnnnnnnnnnnnnnnnnnnnnnnnnnnnnnnnnnnnnnnnnnnnnnnnnnnnnnnnnnnnnnnnnnnnnnnnnnnnnnnnnnnnnnnnnnnnnnnnnnnnnnnnnnnnnnnnnnnnnnnnnnnnnnnnnnnnnnnnnnnnnnnnnnnnnnnnnnnnnnnnnnnnnnnnnnnnnnnnnnnnnnnnnnnnnnnnnnnnnnnnnnnnnnnnnnnnnnnnnnnnnnnnnnnnnnnnnnnnnnnnnnnnnnnnnnnnnnnnnnnnnnnnnnnnnnnnnnnnnnnnnnnnnnnnnnnnnnnnnnnnnnnnnnnnnnnnnnnnnnnnnnnnnnnnnnnnnnnnnnnnnnnnnnnnnnnnnnnnnnnnnnnnnnnnnnnnnnnnnnnnnnnnnnnnnnnnnnnnnnnnnnnnnnnnnnnnnnnnnnnnnnnnnnnnnnnnnnnnnnnnnnnnnnnnnnnnnnnnnnnnnnnnnnnnnnnnnnnnnnnnnnnnnnnnnnnnnnnnnnnnnnnnnnnnnnnnnnnnnnnnnnnnnnnnnnnnnnnnnnnnnnnnnnnnnnnnnnnnnnnnnnnnnnnnnnnnnnnnnnnnnnnnnnnnnnnnnnnnnnnnnnnnnnnnnnnnnnnnnnnnnnnnnnnnnnnnnnnnnnnnnnnnnnnnnnnnnnnnnnnnnnnnnnnnnnnnnnnnnnnnnnnnnnnnnnnnnnnnnnnnnnnnnnnnnnnnnnnnnnnnnnnnnnnnnnnnnnnnnnnnnnnnnnnnnnnnnnnnnnnnnnnnnnnnnnnnnnnnnnnnnnnnnnnnnnnnnnnnnnnnnnnnnnnnnnnnnnnnnnnnnnnnnnnnnnnnnnnnnnnnnnnnnnnnnnnnnnnnnnnnnnnnnnnnnnnnnnnnnnnnnnnnnnnnnnnnnnnnnnnnnnnnnnnnnnnnnnnnnnnnnnnnnnnnnnnnnnnnnnnnnnnnnnnnnnnnnnnnnnnnnnnnnnnnnnnnnnnnnnnnnnnnnnnnnnnnnnnnnnnnnnnnnnnnnnnnnnnnnnnnnnnnnnnnnnnnnnnnnnnnnnnnnnnnnnnnnnnnnnnnnnnnnnnnnnnnnnnnnnnnnnnnnnnnnnnnnnnnnnnnnnnnnnnnnnnnnnnnnnnnnnnnnnnnnnnnnnnnnnnnnnnnnnnnnnnnnnnnnnnnnnnnnnnnnnnnnnnnnnnnnnnnnnnnnnnnnnnnnnnnnnnnnnnnnnnnnnnnnnnnnnnnnnnnnnnnnnnnnnnnnnnnnnnnnnnnnnnnnnnnnnnnnnnnnnnnnnnnnnnnnnnnnnnnnnnnnnnnnnnnnnnnnnnnnnnnnnnnnnnnnnnnnnnnnnnnnnnnnnnnnnnnnnnnnnnnnnnnnnnnnnnnnnnnnnnnnnnnnnnnnnnnnnnnnnnnnnnnnnnnnnnnnnnnnnnnnnnnnnnnnnnnnnnnnnnnnnnnnnnnnnnnnnnnnnnnnnnnnnnnnnnnnnnnnnnnnnnnnnnnnnnnnnnnnnnnnnnnnnnnnnnnnnnnnnnnnnnnnnnnnnnnnnnnnnnnnnnnnnnnnnnnnnnnnnnnnnnnnnnnnnnnnnnnnnnnnnnnnnnnnnnnnnnnnnnnnnnnnnnnnnnnnnnnnnnnnnnnnnnnnnnnnnnnnnnnnnnnnnnnnnnnnnnnnnnnnnnnnnnnnnnnnnnnnnnnnnnnnnnnnnnnnnnnnnnnnnnnnnnnnnnnnnnnnnnnnnnnnnnnnnnnnnnnnnnnnnnnnnnnnnnnnnnnnnnnnnnnnnnnnnnnnnnnnnnnnnnnnnnnnnnnnnnnnnnnnnnnnnnnnnnnnnnnnnnnnnnnnnnnnnnnnnnnnnnnnnnnnnnnnnnnnnnnnnnnnnnnnnnnnnnnnnnnnnnnnnnnnnnnnnnnnnnnnnnnnnnnnnnnnnnnnnnnnnnnnnnnnnnnnnnnnnnnnnnnnnnnnnnnnnnnnnnnnnnnnnnnnnnnnnnnnnnnnnnnnnnnnnnnnnnnnnnnnnnnnnnnnnnnnnnnnnnnnnnnnnnnnnnnnnnnnnnnnnnnnnnnnnnnnnnnnnnnnnnnnnnnnnnnnnnnnnnnnnnnnnnnnnnnnnnnnnnnnnnnnnnnnnnnnnnnnnnnnnnnnnnnnnnnnnnnnnnnnnnnnnnnnnnnnnnnnnnnnnnnnnnnnnnnnnnnnnnnnnnnnnnnnnnnnnnnnnnnnnnnnnnnnnnnnnnnnnnnnnnnnnnnnnnnnnnnnnnnnnnnnnnnnnnnnnnnnnnnnnnnnnnnnnnnnnnnnnnnnnnnnnnnnnnnnnnnnnnnnnnnnnnnnnnnnnnnnnnnnnnnnnnnnnnnnnnnnnnnnnnnnnnnnnnnnnnnnnnnnnnnnnnnnnnnnnnnnnnnnnnnnnnnnnnnnnnnnnnnnnnnnnnnnnnnnnnnnnnnnnnnnnnnnnnnnnnnnnnnnnnnnnnnnnnnnnnnnnnnnnnnnnnnnnnnnnnnnnnnnnnnnnnnnnnnnnnnnnnnnnnnnnnnnnnnnnnnnnnnnnnnnnnnnnnnnnnnnnnnnnnnnnnnnnnnnnnnnnnnnnnnnnnnnnnnnnnnnnnnnnnnnnnnnnnnnnnnnnnnnnnnnnnnnnnnnnnnnnnnnnnnnnnnnnnnnnnnnnnnnnnnnnnnnnnnnnnnnnnnnnnnnnnnnnnnnnnnnnnnnnnnnnnnnnnnnnnnnnnnnnnnnnnnnnnnnnnnnnnnnnnnnnnnnnnnnnnnnnnnnnnnnnnnnnnnnnnnnnnnnnnnnnnnnnnnnnnnnnnnnnnnnnnnnnnnnnnnnnnnnnnnnnnnnnnnnnnnnnnnnnnnnnnnnnnnnnnnnnnnnnnnnnnnnnnnnnnnnnnnnnnnnnnnnnnnnnnnnnnnnnnnnnnnnnnnnnnnnnnnnnnnnnnnnnnnnnnnnnnnnnnnnnnnnnnnnnnnnnnnnnnnnnnnnnnnnnnnnnnnnnnnnnnnnnnnnnnnnnnnnnnnnnnnnnnnnnnnnnnnnnnnnnnnnnnnnnnnnnnnnnnnnnnnnnnnnnnnnnnnnnnnnnnnnnnnnnnnnnnnnnnnnnnnnnnnnnnnnnnnnnnnnnnnnnnnnnnnnnnnnnnnnnnnnnnnnnnnnnnnnnnnnnnnnnnnnnnnnnnnnnnnnnnnnnnnnnnnnnnnnnnnnnnnnnnnnnnnnnnnnnnnnnnnnnnnnnnnnnnnnnnnnnnnnnnnnnnnnnnnnnnnnnnnnnnnnnnnnnnnnnnnnnnnnnnnnnnnnnnnnnnnnnnnnnnnnnnnnnnnnnnnnnnnnnnnnnnnnnnnnnnnnnnnnnnnnnnnnnnnnnnnnnnnnnnnnnnnnnnnnnnnnnnnnnnnnnnnnnnnnnnnnnnnnnnnnnnnnnnnnnnnnnnnnnnnnnnnnnnnnnnnnnnnnnnnnnnnnnnnnnnnnnnnnnnnnnnnnnnnnnnnnnnnnnnnnnnnnnnnnnnnnnnnnnnnnnnnnnnnnnnnnnnnnnnnnnnnnnnnnnnnnnnnnnnnnnnnnnnnnnnnnnnnnnnnnnnnnnnnnnnnnnnnnnnnnnnnnnnnnnnnnnnnnnnnnnnnnnnnnnnnnnnnnnnnnnnnnnnnnnnnnnnnnnnnnnnnnnnnnnnnnnnnnnnnnnnnnnnnnnnnnnnnnnnnnnnnnnnnnnnnnnnnnnnnnnnnnnnnnnnnnnnnnnnnnnnnnnnnnnnnnnnnnnnnnnnnnnnnnnnnnnnnnnnnnnnnnnnnnnnnnnnnnnnnnnnnnnnnnnnnnnnnnnnnnnnnnnnnnnnnnnnnnnnnnnnnnnnnnnnnnnnnnnnnnnnnnnnnnnnnnnnnnnnnnnnnnnnnnnnnnnnnnnnnnnnnnnnnnnnnnnnnnnnnnnnnnnnnnnnnnnnnnnnnnnnnnnnnnnnnnnnnnnnnnnnnnnnnnnnnnnnnnnnnnnnnnnnnnnnnnnnnnnnnnnnnnnnnnnnnnnnnnnnnnnnnnnnnnnnnnnnnnnnnnnnnnnnnnnnnnnnnnnnnnnnnnnnnnnnnnnnnnnnnnnnnnnnnnnnnnnnnnnnnnnnnnnnnnnnnnnnnnnnnnnnnnnnnnnnnnnnnnnnnnnnnnnnnnnnnnnnnnnnnnnnnnnnnnnnnnnnnnnnnnnnnnnnnnnnnnnnnnnnnnnnnnnnnnnnnnnnnnnnnnnnnnnnnnnnnnnnnnnnnnnnnnnnnnnnnnnnnnnnnnnnnnnnnnnnnnnnnnnnnnnnnnnnnnnnnnnnnnnnnnnnnnnnnnnnnnnnnnnnnnnnnnnnnnnnnnnnnnnnnnnnnnnnnnnnnnnnnnnnnnnnnnnnnnnnnnnnnnnnnnnnnnnnnnnnnnnnnnnnnnnnnnnnnnnnnnnnnnnnnnnnnnnnnnnnnnnnnnnnnnnnnnnnnnnnnnnnnnnnnnnnnnnnnnnnnnnnnnnnnnnnnnnnnnnnnnnnnnnnnnnnnnnnnnnnnnnnnnnnnnnnnnnnnnnnnnnnnnnnnnnnnnnnnnnnnnnnnnnnnnnnnnnnnnnnnnnnnnnnnnnnnnnnnnnnnnnnnnnnnnnnnnnnnnnnnnnnnnnnnnnnnnnnnnnnnnnnnnnnnnnnnnnnnnnnnnnnnnnnnnnnnnnnnnnnnnnnnnnnnnnnnnnnnnnnnnnnnnnnnnnnnnnnnnnnnnnnnnnnnnnnnnnnnnnnnnnnnnnnnnnnnnnnnnnnnnnnnnnnnnnnnnnnnnnnnnnnnnnnnnnnnnnnnnnnnnnnnnnnnnnnnnnnnnnnnnnnnnnnnnnnnnnnnnnnnnnnnnnnnnnnnnnnnnnnnnnnnnnnnnnnnnnnnnnnnnnnnnnnnnnnnnnnnnnnnnnnnnnnnnnnnnnnnnnnnnnnnnnnnnnnnnnnnnnnnnnnnnnnnnnnnnnnnnnnnnnnnnnnnnnnnnnnnnnnnnnnnnnnnnnnnnnnnnnnnnnnnnnnnnnnnnnnnnnnnnnnnnnnnnnnnnnnnnnnnnnnnnnnnnnnnnnnnnnnnnnnnnnnnnnnnnnnnnnnnnnnnnnnnnnnnnnnnnnnnnnnnnnnnnnnnnnnnnnnnnnnnnnnnnnnnnnnnnnnnnnnnnnnnnnnnnnnnnnnnnnnnnnnnnnnnnnnnnnnnnnnnnnnnnnnnnnnnnnnnnnnnnnnnnnnnnnnnnnnnnnnnnnnnnnnnnnnnnnnnnnnnnnnnnnnnnnnnnnnnnnnnnnnnnnnnnnnnnnnnnnnnnnnnnnnnnnnnnnnnnnnnnnnnnnnnnnnnnnnnnnnnnnnnnnnnnnnnnnnnnnnnnnnnnnnnnnnnnnnnnnnnnnnnnnnnnnnnnnnnnnnnnnnnnnnnnnnnnnnnnnnnnnnnnnnnnnnnnnnnnnnnnnnnnnnnnnnnnnnnnnnnnnnnnnnnnnnnnnnnnnnnnnnnnnnnnnnnnnnnnnnnnnnnnnnnnnnnnnnnnnnnnnnnnnnnnnnnnnnnnnnnnnnnnnnnnnnnnnnnnnnnnnnnnnnnnnnnnnnnnnnnnnnnnnnnnnnnnnnnnnnnnnnnnnnnnnnnnnnnnnnnnnnnnnnnnnnnnnnnnnnnnnnnnnnnnnnnnnnnnnnnnnnnnnnnnnnnnnnnnnnnnnnnnnnnnnnnnnnnnnnnnnnnnnnnnnnnnnnnnnnnnnnnnnnnnnnnnnnnnnnnnnnnnnnnnnnnnnnnnnnnnnnnnnnnnnnnnnnnnnnnnnnnnnnnnnnnnnnnnnnnnnnnnnnnnnnnnnnnnnnnnnnnnnnnnnnnnnnnnnnnnnnnnnnnnnnnnnnnnnnnnnnnnnnnnnnnnnnnnnnnnnnnnnnnnnnnnnnnnnnnnnnnnnnnnnnnnnnnnnnnnnnnnnnnnnnnnnnnnnnnnnnnnnnnnnnnnnnnnnnnnnnnnnnnnnnnnnnnnnnnnnnnnnnnnnnnnnnnnnnnnnnnnnnnnnnnnnnnnnnnnnnnnnnnnnnnnnnnnnnnnnnnnnnnnnnnnnnnnnnnnnnnnnnnnnnnnnnnnnnnnnnnnnnnnnnnnnnnnnnnnnnnnnnnnnnnnnnnnnnnnnnnnnnnnnnnnnnnnnnnnnnnnnnnnnnnnnnnnnnnnnnnnnnnnnnnnnnnnnnnnnnnnnnnnnnnnnnnnnnnnnnnnnnnnnnnnnnnnnnnnnnnnnnnnnnnnnnnnnnnnnnnnnnnnnnnnnnnnnnnnnnnnnnnnnnnnnnnnnnnnnnnnnnnnnnnnnnnnnnnnnnnnnnnnnnnnnnnnnnnnnnnnnnnnnnnnnnnnnnnnnnnnnnnnnnnnnnnnnnnnnnnnnnnnnnnnnnnnnnnnnnnnnnnnnnnnnnnnnnnnnnnnnnnnnnnnnnnnnnnnnnnnnnnnnnnnnnnnnnnnnnnnnnnnnnnnnnnnnnnnnnnnnnnnnnnnnnnnnnnnnnnnnnnnnnnnnnnnnnnnnnnnnnnnnnnnnnnnnnnnnnnnnnnnnnnnnnnnnnnnnnnnnnnnnnnnnnnnnnnnnnnnnnnnnnnnnnnnnnnnnnnnnnnnnnnnnnnnnnnnnnnnnnnnnnnnnnnnnnnnnnnnnnnnnnnnnnnnnnnnnnnnnnnnnnnnnnnnnnnnnnnnnnnnnnnnnnnnnnnnnnnnnnnnnnnnnnnnnnnnnnnnnnnnnnnnnnnnnnnnnnnnnnnnnnnnnnnnnnnnnnnnnnnnnnnnnnnnnnnnnnnnnnnnnnnnnnnnnnnnnnnnnnnnnnnnnnnnnnnnnnnnnnnnnnnnnnnnnnnnnnnnnnnnnnnnnnnnnnnnnnnnnnnnnnnnnnnnnnnnnnnnnnnnnnnnnnnnnnnnnnnnnnnnnnnnnnnnnnnnnnnnnnnnnnnnnnnnnnnnnnnnnnnnnnnnnnnnnnnnnnnnnnnnnnnnnnnnnnnnnnnnnnnnnnnnnnnnnnnnnnnnnnnnnnnnnnnnnnnnnnnnnnnnnnnnnnnnnnnnnnnnnnnnnnnnnnnnnnnnnnnnnnnnnnnnnnnnnnnnnnnnnnnnnnnnnnnnnnnnnnnnnnnnnnnnnnnnnnnnnnnnnnnnnnnnnnnnnnnnnnnnnnnnnnnnnnnnnnnnnnnnnnnnnnnnnnnnnnnnnnnnnnnnnnnnnnnnnnnnnnnnnnnnnnnnnnnnnnnnnnnnnnnnnnnnnnnnnnnnnnnnnnnnnnnnnnnnnnnnnnnnnnnnnnnnnnnnnnnnnnnnnnnnnnnnnnnnnnnnnnnnnnnnnnnnnnnnnnnnnnnnnnnnnnnnnnnnnnnnnnnnnnnnnnnnnnnnnnnnnnnnnnnnnnnnnnnnnnnnnnnnnnnnnnnnnnnnnnnnnnnnnnnnnnnnnnnnnnnnnnnnnnnnnnnnnnnnnnnnnnnnnnnnnnnnnnnnnnnnnnnnnnnnnnnnnnnnnnnnnnnnnnnnnnnnnnnnnnnnnnnnnnnnnnnnnnnnnnnnnnnnnnnnnnnnnnnnnnnnnnnnnnnnnnnnnnnnnnnnnnnnnnnnnnnnnnnnnnnnnnnnnnnnnnnnnnnnnnnnnnnnnnnnnnnnnnnnnnnnnnnnnnnnnnnnnnnnnnnnnnnnnnnnnnnnnnnnnnnnnnnnnnnnnnnnnnnnnnnnnnnnnnnnnnnnnnnnnnnnnnnnnnnnnnnnnnnnnnnnnnnnnnnnnnnnnnnnnnnnnnnnnnnnnnnnnnnnnnnnnnnnnnnnnnnnnnnnnnnnnnnnnnnnnnnnnnnnnnnnnnnnnnnnnnnnnnnnnnnnnnnnnnnnnnnnnnnnnnnnnnnnnnnnnnnnnnnnnnnnnnnnnnnnnnnnnnnnnnnnnnnnnnnnnnnnnnnnnnnnnnnnnnnnnnnnnnnnnnnnnnnnnnnnnnnnnnnnnnnnnnnnnnnnnnnnnnnnnnnnnnnnnnnnnnnnnnnnnnnnnnnnnnnnnnnnnnnnnnnnnnnnnnnnnnnnnnnnnnnnnnnnnnnnnnnnnnnnnnnnnnnnnnnnnnnnnnnnnnnnnnnnnnnnnnnnnnnnnnnnnnnnnnnnnnnnnnnnnnnnnnnnnnnnnnnnnnnnnnnnnnnnnnnnnnnnnnnnnnnnnnnnnnnnnnnnnnnnnnnnnnnnnnnnnnnnnnnnnnnnnnnnnnnnnnnnnnnnnnnnnnnnnnnnnnnnnnnnnnnnnnnnnnnnnnnnnnnnnnnnnnnnnnnnnnnnnnnnnnnnnnnnnnnnnnnnnnnnnnnnnnnnnnnnnnnnnnnnnnnnnnnnnnnnnnnnnnnnnnnnnnnnnnnnnnnnnnnnnnnnnnnnnnnnnnnnnnnnnnnnnnnnnnnnnnnnnnnnnnnnnnnnnnnnnnnnnnnnnnnnnnnnnnnnnnnnnnnnnnnnnnnnnnnnnnnnnnnnnnnnnnnnnnnnnnnnnnnnnnnnnnnnnnnnnnnnnnnnnnnnnnnnnnnnnnnnnnnnnnnnnnnnnnnnnnnnnnnnnnnnnnnnnnnnnnnnnnnnnnnnnnnnnnnnnnnnnnnnnnnnnnnnnnnnnnnnnnnnnnnnnnnnnnnnnnnnnnnnnnnnnnnnnnnnnnnnnnnnnnnnnnnnnnnnnnnnnnnnnnnnnnnnnnnnnnnnnnnnnnnnnnnnnnnnnnnnnnnnnnnnnnnnnnnnnnnnnnnnnnnnnnnnnnnnnnnnnnnnnnnnnnnnnnnnnnnnnnnnnnnnnnnnnnnnnnnnnnnnnnnnnnnnnnnnnnnnnnnnnnnnnnnnnnnnnnnnnnnnnnnnnnnnnnnnnnnnnnnnnnnnnnnnnnnnnnnnnnnnnnnnnnnnnnnnnnnnnnnnnnnnnnnnnnnnnnnnnnnnnnnnnnnnnnnnnnnnnnnnnnnnnnnnnnnnnnnnnnnnnnnnnnnnnnnnnnnnnnnnnnnnnnnnnnnnnnnnnnnnnnnnnnnnnnnnnnnnnnnnnnnnnnnnnnnnnnnnnnnnnnnnnnnnnnnnnnnnnnnnnnnnnnnnnnnnnnnnnnnnnnnnnnnnnnnnnnnnnnnnnnnnnnnnnnnnnnnnnnnnnnnnnnnnnnnnnnnnnnnnnnnnnnnnnnnnnnnnnnnnnnnnnnnnnnnnnnnnnnnnnnnnnnnnnnnnnnnnnnnnnnnnnnnnnnnnnnnnnnnnnnnnnnnnnnnnnnnnnnnnnnnnnnnnnnnnnnnnnnnnnnnnnnnnnnnnnnnnnnnnnnnnnnnnnnnnnnnnnnnnnnnnnnnnnnnnnnnnnnnnnnnnnnnnnnnnnnnnnnnnnnnnnnnnnnnnnnnnnnnnnnnnnnnnnnnnnnnnnnnnnnnnnnnnnnnnnnnnnnnnnnnnnnnnnnnnnnnnnnnnnnnnnnnnnnnnnnnnnnnnnnnnnnnnnnnnnnnnnnnnnnnnnnnnnnnnnnnnnnnnnnnnnnnnnnnnnnnnnnnnnnnnnnnnnnnnnnnnnnnnnnnnnnnnnnnnnnnnnnnnnnnnnnnnnnnnnnnnnnnnnnnnnnnnnnnnnnnnnnnnnnnnnnnnnnnnnnnnnnnnnnnnnnnnnnnnnnnnnnnnnnnnnnnnnnnnnnnnnnnnnnnnnnnnnnnnnnnnnnnnnnnnnnnnnnnnnnnnnnnnnnnnnnnnnnnnnnnnnnnnnnnnnnnnnnnnnnnnnnnnnnnnnnnnnnnnnnnnnnnnnnnnnnnnnnnnnnnnnnnnnnnnnnnnnnnnnnnnnnnnnnnnnnnnnnnnnnnnnnnnnnnnnnnnnnnnnnnnnnnnnnnnnnnnnnnnnnnnnnnnnnnnnnnnnnnnnnnnnnnnnnnnnnnnnnnnnnnnnnnnnnnnnnnnnnnnnnnnnnnnnnnnnnnnnnnnnnnnnnnnnnnnnnnnnnnnnnnnnnnnnnnnnnnnnnnnnnnnnnnnnnnnnnnnnnnnnnnnnnnnnnnnnnnnnnnnnnnnnnnnnnnnnnnnnnnnnnnnnnnnnnnnnnnnnnnnnnnnnnnnnnnnnnnnnnnnnnnnnnnnnnnnnnnnnnnnnnnnnnnnnnnnnnnnnnnnnnnnnnnnnnnnnnnnnnnnnnnnnnnnnnnnnnnnnnnnnnnnnnnnnnnnnnnnnnnnnnnnnnnnnnnnnnnnnnnnnnnnnnnnnnnnnnnnnnnnnnnnnnnnnnnnnnnnnnnnnnnnnnnnnnnnnnnnnnnnnnnnnnnnnnnnnnnnnnnnnnnnnnnnnnnnnnnnnnnnnnnnnnnnnnnnnnnnnnnnnnnnnnnnnnnnnnnnnnnnnnnnnnnnnnnnnnnnnnnnnnnnnnnnnnnnnnnnnnnnnnnnnnnnnnnnnnnnnnnnnnnnnnnnnnnnnnnnnnnnnnnnnnnnnnnnnnnnnnnnnnnnnnnnnnnnnnnnnnnnnnnnnnnnnnnnnnnnnnnnnnnnnnnnnnnnnnnnnnnnnnnnnnnnnnnnnnnnnnnnnnnnnnnnnnnnnnnnnnnnnnnnnnnnnnnnnnnnnnnnnnnnnnnnnnnnnnnnnnnnnnnnnnnnnnnnnnnnnnnnnnnnnnnnnnnnnnnnnnnnnnnnnnnnnnnnnnnnnnnnnnnnnnnnnnnnnnnnnnnnnnnnnnnnnnnnnnnnnnnnnnnnnnnnnnnnnnnnnnnnnnnnnnnnnnnnnnnnnnnnnnnnnnnnnnnnnnnnnnnnnnnnnnnnnnnnnnnnnnnnnnnnnnnnnnnnnnnnnnnnnnnnnnnnnnnnnnnnnnnnnnnnnnnnnnnnnnnnnnnnnnnnnnnnnnnnnnnnnnnnnnnnnnnnnnnnnnnnnnnnnnnnnnnnnnnnnnnnnnnnnnnnnnnnnnnnnnnnnnnnnnnnnnnnnnnnnnnnnnnnnnnnnnnnnnnnnnnnnnnnnnnnnnnnnnnnnnnnnnnnnnnnnnnnnnnnnnnnnnnnnnnnnnnnnnnnnnnnnnnnnnnnnnnnnnnnnnnnnnnnnnnnnnnnnnnnnnnnnnnnnnnnnnnnnnnnnnnnnnnnnnnnnnnnnnnnnnnnnnnnnnnnnnnnnnnnnnnnnnnnnnnnnnnnnnnnnnnnnnnnnnnnnnnnnnnnnnnnnnnnnnnnnnnnnnnnnnnnnnnnnnnnnnnnnnnnnnnnnnnnnnnnnnnnnnnnnnnnnnnnnnnnnnnnnnnnnnnnnnnnnnnnnnnnnnnnnnnnnnnnnnnnnnnnnnnnnnnnnnnnnnnnnnnnnnnnnnnnnnnnnnnnnnnnnnnnnnnnnnnnnnnnnnnnnnnnnnnnnnnnnnnnnnnnnnnnnnnnnnnnnnnnnnnnnnnnnnnnnnnnnnnnnnnnnnnnnnnnnnnnnnnnnnnnnnnnnnnnnnnnnnnnnnnnnnnnnnnnnnnnnnnnnnnnnnnnnnnnnnnnnnnnnnnnnnnnnnnnnnnnnnnnnnnnnnnnnnnnnnnnnnnnnnnnnnnnnnnnnnnnnnnnnnnnnnnnnnnnnnnnnnnnnnnnnnnnnnnnnnnnnnnnnnnnnnnnnnnnnnnnnnnnnnnnnnnnnnnnnnnnnnnnnnnnnnnnnnnnnnnnnnnnnnnnnnnnnnnnnnnnnnnnnnnnnnnnnnnnnnnnnnnnnnnnnnnnnnnnnnnnnnnnnnnnnnnnnnnnnnnnnnnnnnnnnnnnnnnnnnnnnnnnnnnnnnnnnnnnnnnnnnnnnnnnnnnnnnnnnnnnnnnnnnnnnnnnnnnnnnnnnnnnnnnnnnnnnnnnnnnnnnnnnnnnnnnnnnnnnnnnnnnnnnnnnnnnnnnnnnnnnnnnnnnnnnnnnnnnnnnnnnnnnnnnnnnnnnnnnnnnnnnnnnnnnnnnnnnnnnnnnnnnnnnnnnnnnnnnnnnnnnnnnnnnnnnnnnnnnnnnnnnnnnnnnnnnnnnnnnnnnnnnnnnnnnnnnnnnnnnnnnnnnnnnnnnnnnnnnnnnnnnnnnnnnnnnnnnnnnnnnnnnnnnnnnnnnnnnnnnnnnnnnnnnnnnnnnnnnnnnnnnnnnnnnnnnnnnnnnnnnnnnnnnnnnnnnnnnnnnnnnnnnnnnnnnnnnnnnnnnnnnnnnnnnnnnnnnnnnnnnnnnnnnnnnnnnnnnnnnnnnnnnnnnnnnnnnnnnnnnnnnnnnnnnnnnnnnnnnnnnnnnnnnnnnnnnnnnnnnnnnnnnnnnnnnnnnnnnnnnnnnnnnnnnnnnnnnnnnnnnnnnnnnnnnnnnnnnnnnnnnnnnnnnnnnnnnnnnnnnnnnnnnnnnnnnnnnnnnnnnnnnnnnnnnnnnnnnnnnnnnnnnnnnnnnnnnnnnnnnnnnnnnnnnnnnnnnnnnnnnnnnnnnnnnnnnnnnnnnnnnnnnnnnnnnnnnnnnnnnnnnnnnnnnnnnnnnnnnnnnnnnnnnnnnnnnnnnnnnnnnnnnnnnnnnnnnnnnnnnnnnnnnnnnnnnnnnnnnnnnnnnnnnnnnnnnnnnnnnnnnnnnnnnnnnnnnnnnnnnnnnnnnnnnnnnnnnnnnnnnnnnnnnnnnnnnnnnnnnnnnnnnnnnnnnnnnnnnnnnnnnnnnnnnnnnnnnnnnnnnnnnnnnnnnnnnnnnnnnnnnnnnnnnnnnnnnnnnnnnnnnnnnnnnnnnnnnnnnnnnnnnnnnnnnnnnnnnnnnnnnnnnnnnnnnnnnnnnnnnnnnnnnnnnnnnnnnnnnnnnnnnnnnnnnnnnnnnnnnnnnnnnnnnnnnnnnnnnnnnnnnnnnnnnnnnnnnnnnnnnnnnnnnnnnnnnnnnnnnnnnnnnnnnnnnnnnnnnnnnnnnnnnnnnnnnnnnnnnnnnnnnnnnnnnnnnnnnnnnnnnnnnnnnnnnnnnnnnnnnnnnnnnnnnnnnnnnnnnnnnnnnnnnnnnnnnnnnnnnnnnnnnnnnnnnnnnnnnnnnnnnnnnnnnnnnnnnnnnnnnnnnnnnnnnnnnnnnnnnnnnnnnnnnnnnnnnnnnnnnnnnnnnnnnnnnnnnnnnnnnnnnnnnnnnnnnnnnnnnnnnnnnnnnnnnnnnnnnnnnnnnnnnnnnnnnnnnnnnnnnnnnnnnnnnnnnnnnnnnnnnnnnnnnnnnnnnnnnnnnnnnnnnnnnnnnnnnnnnnnnnnnnnnnnnnnnnnnnnnnnnnnnnnnnnnnnnnnnnnnnnnnnnnnnnnnnnnnnnnnnnnnnnnnnnnnnnnnnnnnnnnnnnnnnnnnnnnnnnnnnnnnnnnnnnnnnnnnnnnnnnnnnnnnnnnnnnnnnnnnnnnnnnnnnnnnnnnnnnnnnnnnnnnnnnnnnnnnnnnnnnnnnnnnnnnnnnnnnnnnnnnnnnnnnnnnnnnnnnnnnnnnnnnnnnnnnnnnnnnnnnnnnnnnnnnnnnnnnnnnnnnnnnnnnnnnnnnnnnnnnnnnnnnnnnnnnnnnnnnnnnnnnnnnnnnnnnnnnnnnnnnnnnnnnnnnnnnnnnnnnnnnnnnnnnnnnnnnnnnnnnnnnnnnnnnnnnnnnnnnnnnnnnnnnnnnnnnnnnnnnnnnnnnnnnnnnnnnnnnnnnnnnnnnnnnnnnnnnnnnnnnnnnnnnnnnnnnnnnnnnnnnnnnnnnnnnnnnnnnnnnnnnnnnnnnnnnnnnnnnnnnnnnnnnnnnnnnnnnnnnnnnnnnnnnnnnnnnnnnnnnnnnnnnnnnnnnnnnnnnnnnnnnnnnnnnnnnnnnnnnnnnnnnnnnnnnnnnnnnnnnnnnnnnnnnnnnnnnnnnnnnnnnnnnnnnnnnnnnnnnnnnnnnnnnnnnnnnnnnnnnnnnnnnnnnnnnnnnnnnnnnnnnnnnnnnnnnnnnnnnnnnnnnnnnnnnnnnnnnnnnnnnnnnnnnnnnnnnnnnnnnnnnnnnnnnnnnnnnnnnnnnnnnnnnnnnnnnnnnnnnnnnnnnnnnnnnnnnnnnnnnnnnnnnnnnnnnnnnnnnnnnnnnnnnnnnnnnnnnnnnnnnnnnnnnnnnnnnnnnnnnnnnnnnnnnnnnnnnnnnnnnnnnnnnnnnnnnnnnnnnnnnnnnnnnnnnnnnnnnnnnnnnnnnnnnnnnnnnnnnnnnnnnnnnnnnnnnnnnnnnnnnnnnnnnnnnnnnnnnnnnnnnnnnnnnnnnnnnnnnnnnnnnnnnnnnnnnnnnnnnnnnnnnnnnnnnnnnnnnnnnnnnnnnnnnnnnnnnnnnnnnnnnnnnnnnnnnnnnnnnnnnnnnnnnnnnnnnnnnnnnnnnnnnnnnnnnnnnnnnnnnnnnnnnnnnnnnnnnnnnnnnnnnnnnnnnnnnnnnnnnnnnnnnnnnnnnnnnnnnnnnnnnnnnnnnnnnnnnnnnnnnnnnnnnnnnnnnnnnnnnnnnnnnnnnnnnnnnnnnnnnnnnnnnnnnnnnnnnnnnnnnnnnnnnnnnnnnnnnnnnnnnnnnnnnnnnnnnnnnnnnnnnnnnnnnnnnnnnnnnnnnnnnnnnnnnnnnnnnnnnnnnnnnnnnnnnnnnnnnnnnnnnnnnnnnnnnnnnnnnnnnnnnnnnnnnnnnnnnnnnnnnnnnnnnnnnnnnnnnnnnnnnnnnnnnnnnnnnnnnnnnnnnnnnnnnnnnnnnnnnnnnnnnnnnnnnnnnnnnnnnnnnnnnnnnnnnnnnnnnnnnnnnnnnnnnnnnnnnnnnnnnnnnnnnnnnnnnnnnnnnnnnnnnnnnnnnnnnnnnnnnnnnnnnnnnnnnnnnnnnnnnnnnnnnnnnnnnnnnnnnnnnnnnnnnnnnnnnnnnnnnnnnnnnnnnnnnnnnnnnnnnnnnnnnnnnnnnnnnnnnnnnnnnnnnnnnnnnnnnnnnnnnnnnnnnnnnnnnnnnnnnnnnnnnnnnnnnnnnnnnnnnnnnnnnnnnnnnnnnnnnnnnnnnnnnnnnnnnnnnnnnnnnnnnnnnnnnnnnnnnnnnnnnnnnnnnnnnnnnnnnnnnnnnnnnnnnnnnnnnnnnnnnnnnnnnnnnnnnnnnnnnnnnnnnnnnnnnnnnnnnnnnnnnnnnnnnnnnnnnnnnnnnnnnnnnnnnnnnnnnnnnnnnnnnnnnnnnnnnnnnnnnnnnnnnnnnnnnnnnnnnnnnnnnnnnnnnnnnnnnnnnnnnnnnnnnnnnnnnnnnnnnnnnnnnnnnnnnnnnnnnnnnnnnnnnnnnnnnnnnnnnnnnnnnnnnnnnnnnnnnnnnnnnnnnnnnnnnnnnnnnnnnnnnnnnnnnnnnnnnnnnnnnnnnnnnnnnnnnnnnnnnnnnnnnnnnnnnnnnnnnnnnnnnnnnnnnnnnnnnnnnnnnnnnnnnnnnnnnnnnnnnnnnnnnnnnnnnnnnnnnnnnnnnnnnnnnnnnnnnnnnnnnnnnnnnnnnnnnnnnnnnnnnnnnnnnnnnnnnnnnnnnnnnnnnnnnnnnnnnnnnnnnnnnnnnnnnnnnnnnnnnnnnnnnnnnnnnnnnnnnnnnnnnnnnnnnnnnnnnnnnnnnnnnnnnnnnnnnnnnnnnnnnnnnnnnnnnnnnnnnnnnnnnnnnnnnnnnnnnnnnnnnnnnnnnnnnnnnnnnnnnnnnnnnnnnnnnnnnnnnnnnnnnnnnnnnnnnnnnnnnnnnnnnnnnnnnnnnnnnnnnnnnnnnnnnnnnnnnnnnnnnnnnnnnnnnnnnnnnnnnnnnnnnnnnnnnnnnnnnnnnnnnnnnnnnnnnnnnnnnnnnnnnnnnnnnnnnnnnnnnnnnnnnnnnnnnnnnnnnnnnnnnnnnnnnnnnnnnnnnnnnnnnnnnnnnnnnnnnnnnnnnnnnnnnnnnnnnnnnnnnnnnnnnnnnnnnnnnnnnnnnnnnnnnnnnnnnnnnnnnnnnnnnnnnnnnnnnnnnnnnnnnnnnnnnnnnnnnnnnnnnnnnnnnnnnnnnnnnnnnnnnnnnnnnnnnnnnnnnnnnnnnnnnnnnnnnnnnnnnnnnnnnnnnnnnnnnnnnnnnnnnnnnnnnnnnnnnnnnnnnnnnnnnnnnnnnnnnnnnnnnnnnnnnnnnnnnnnnnnnnnnnnnnnnnnnnnnnnnnnnnnnnnnnnnnnnnnnnnnnnnnnnnnnnnnnnnnnnnnnnnnnnnnnnnnnnnnnnnnnnnnnnnnnnnnnnnnnnnnnnnnnnnnnnnnnnnnnnnnnnnnnnnnnnnnnnnnnnnnnnnnnnnnnnnnnnnnnnnnnnnnnnnnnnnnnnnnnnnnnnnnnnnnnnnnnnnnnnnnnnnnnnnnnnnnnnnnnnnnnnnnnnnnnnnnnnnnnnnnnnnnnnnnnnnnnnnnnnnnnnnnnnnnnnnnnnnnnnnnnnnnnnnnnnnnnnnnnnnnnnnnnnnnnnnnnnnnnnnnnnnnnnnnnnnnnnnnnnnnnnnnnnnnnnnnnnnnnnnnnnnnnnnnnnnnnnnnnnnnnnnnnnnnnnnnnnnnnnnnnnnnnnnnnnnnnnnnnnnnnnnnnnnnnnnnnnnnnnnnnnnnnnnnnnnnnnnnnnnnnnnnnnnnnnnnnnnnnnnnnnnnnnnnnnnnnnnnnnnnnnnnnnnnnnnnnnnnnnnnnnnnnnnnnnnnnnnnnnnnnnnnnnnnnnnnnnnnnnnnnnnnnnnnnnnnnnnnnnnnnnnnnnnnnnnnnnnnnnnnnnnnnnnnnnnnnnnnnnnnnnnnnnnnnnnnnnnnnnnnnnnnnnnnnnnnnnnnnnnnnnnnnnnnnnnnnnnnnnnnnnnnnnnnnnnnnnnnnnnnnnnnnnnnnnnnnnnnnnnnnnnnnnnnnnnnnnnnnnnnnnnnnnnnnnnnnnnnnnnnnnnnnnnnnnnnnnnnnnnnnnnnnnnnnnnnnnnnnnnnnnnnnnnnnnnnnnnnnnnnnnnnnnnnnnnnnnnnnnnnnnnnnnnnnnnnnnnnnnnnnnnnnnnnnnnnnnnnnnnnnnnnnnnnnnnnnnnnnnnnnnnnnnnnnnnnnnnnnnnnnnnnnnnnnnnnnnnnnnnnnnnnnnnnnnnnnnnnnnnnnnnnnnnnnnnnnnnnnnnnnnnnnnnnnnnnnnnnnnnnnnnnnnnnnnnnnnnnnnnnnnnnnnnnnnnnnnnnnnnnnnnnnnnnnnnnnnnnnnnnnnnnnnnnnnnnnnnnnnnnnnnnnnnnnnnnnnnnnnnnnnnnnnnnnnnnnnnnnnnnnnnnnnnnnnnnnnnnnnnnnnnnnnnnnnnnnnnnnnnnnnnnnnnnnnnnnnnnnnnnnnnnnnnnnnnnnnnnnnnnnnnnnnnnnnnnnnnnnnnnnnnnnnnnnnnnnnnnnnnnnnnnnnnnnnnnnnnnnnnnnnnnnnnnnnnnnnnnnnnnnnnnnnnnnnnnnnnnnnnnnnnnnnnnnnnnnnnnnnnnnnnnnnnnnnnnnnnnnnnnnnnnnnnnnnnnnnnnnnnnnnnnnnnnnnnnnnnnnnnnnnnnnnnnnnnnnnnnnnnnnnnnnnnnnnnnnnnnnnnnnnnnnnnnnnnnnnnnnnnnnnnnnnnnnnnnnnnnnnnnnnnnnnnnnnnnnnnnnnnnnnnnnnnnnnnnnnnnnnnnnnnnnnnnnnnnnnnnnnnnnnnnnnnnnnnnnnnnnnnnnnnnnnnnnnnnnnnnnnnnnnnnnnnnnnnnnnnnnnnnnnnnnnnnnnnnnnnnnnnnnnnnnnnnnnnnnnnnnnnnnnnnnnnnnnnnnnnnnnnnnnnnnnnnnnnnnnnnnnnnnnnnnnnnnnnnnnnnnnnnnnnnnnnnnnnnnnnnnnnnnnnnnnnnnnnnnnnnnnnnnnnnnnnnnnnnnnnnnnnnnnnnnnnnnnnnnnnnnnnnnnnnnnnnnnnnnnnnnnnnnnnnnnnnnnnnnnnnnnnnnnnnnnnnnnnnnnnnnnnnnnnnnnnnnnnnnnnnnnnnnnnnnnnnnnnnnnnnnnnnnnnnnnnnnnnnnnnnnnnnnnnnnnnnnnnnnnnnnnnnnnnnnnnnnnnnnnnnnnnnnnnnnnnnnnnnnnnnnnnnnnnnnnnnnnnnnnnnnnnnnnnnnnnnnnnnnnnnnnnnnnnnnnnnnnnnnnnnnnnnnnnnnnnnnnnnnnnnnnnnnnnnnnnnnnnnnnnnnnnnnnnnnnnnnnnnnnnnnnnnnnnnnnnnnnnnnnnnnnnnnnnnnnnnnnnnnnnnnnnnnnnnnnnnnnnnnnnnnnnnnnnnnnnnnnnnnnnnnnnnnnnnnnnnnnnnnnnnnnnnnnnnnnnnnnnnnnnnnnnnnnnnnnnnnnnnnnnnnnnnnnnnnnnnnnnnnnnnnnnnnnnnnnnnnnnnnnnnnnnnnnnnnnnnnnnnnnnnnnnnnnnnnnnnnnnnnnnnnnnnnnnnnnnnnnnnnnnnnnnnnnnnnnnnnnnnnnnnnnnnnnnnnnnnnnnnnnnnnnnnnnnnnnnnnnnnnnnnnnnnnnnnnnnnnnnnnnnnnnnnnnnnnnnnnnnnnnnnnnnnnnnnnnnnnnnnnnnnnnnnnnnnnnnnnnnnnnnnnnnnnnnnnnnnnnnnnnnnnnnnnnnnnnnnnnnnnnnnnnnnnnnnnnnnnnnnnnnnnnnnnnnnnnnnnnnnnnnnnnnnnnnnnnnnnnnnnnnnnnnnnnnnnnnnnnnnnnnnnnnnnnnnnnnnnnnnnnnnnnnnnnnnnnnnnnnnnnnnnnnnnnnnnnnnnnnnnnnnnnnnnnnnnnnnnnnnnnnnnnnnnnnnnnnnnnnnnnnnnnnnnnnnnnnnnnnnnnnnnnnnnnnnnnnnnnnnnnnnnnnnnnnnnnnnnnnnnnnnnnnnnnnnnnnnnnnnnnnnnnnnnnnnnnnnnnnnnnnnnnnnnnnnnnnnnnnnnnnnnnnnnnnnnnnnnnnnnnnnnnnnnnnnnnnnnnnnnnnnnnnnnnnnnnnnnnnnnnnnnnnnnnnnnnnnnnnnnnnnnnnnnnnnnnnnnnnnnnnnnnnnnnnnnnnnnnnnnnnnnnnnnnnnnnnnnnnnnnnnnnnnnnnnnnnnnnnnnnnnnnnnnnnnnnnnnnnnnnnnnnnnnnnnnnnnnnnnnnnnnnnnnnnnnnnnnnnnnnnnnnnnnnnnnnnnnnnnnnnnnnnnnnnnnnnnnnnnnnnnnnnnnnnnnnnnnnnnnnnnnnnnnnnnnnnnnnnnnnnnnnnnnnnnnnnnnnnnnnnnnnnnnnnnnnnnnnnnnnnnnnnnnnnnnnnnnnnnnnnnnnnnnnnnnnnnnnnnnnnnnnnnnnnnnnnnnnnnnnnnnnnnnnnnnnnnnnnnnnnnnnnnnnnnnnnnnnnnnnnnnnnnnnnnnnnnnnnnnnnnnnnnnnnnnnnnnnnnnnnnnnnnnnnnnnnnnnnnnnnnnnnnnnnnnnnnnnnnnnnnnnnnnnnnnnnnnnnnnnnnnnnnnnnnnnnnnnnnnnnnnnnnnnnnnnnnnnnnnnnnnnnnnnnnnnnnnnnnnnnnnnnnnnnnnnnnnnnnnnnnnnnnnnnnnnnnnnnnnnnnnnnnnnnnnnnnnnnnnnnnnnnnnnnnnnnnnnnnnnnnnnnnnnnnnnnnnnnnnnnnnnnnnnnnnnnnnnnnnnnnnnnnnnnnnnnnnnnnnnnnnnnnnnnnnnnnnnnnnnnnnnnnnnnnnnnnnnnnnnnnnnnnnnnnnnnnnnnnnnnnnnnnnnnnnnnnnnnnnnnnnnnnnnnnnnnnnnnnnnnnnnnnnnnnnnnnnnnnnnnnnnnnnnnnnnnnnnnnnnnnnnnnnnnnnnnnnnnnnnnnnnnnnnnnnnnnnnnnnnnnnnnnnnnnnnnnnnnnnnnnnnnnnnnnnnnnnnnnnnnnnnnnnnnnnnnnnnnnnnnnnnnnnnnnnnnnnnnnnnnnnnnnnnnnnnnnnnnnnnnnnnnnnnnnnnnnnnnnnnnnnnnnnnnnnnnnnnnnnnnnnnnnnnnnnnnnnnnnnnnnnnnnnnnnnnnnnnnnnnnnnnnnnnnnnnnnnnnnnnnnnnnnnnnnnnnnnnnnnnnnnnnnnnnnnnnnnnnnnnnnnnnnnnnnnnnnnnnnnnnnnnnnnnnnnnnnnnnnnnnnnnnnnnnnnnnnnnnnnnnnnnnnnnnnnnnnnnnnnnnnnnnnnnnnnnnnnnnnnnnnnnnnnnnnnnnnnnnnnnnnnnnnnnnnnnnnnnnnnnnnnnnnnnnnnnnnnnnnnnnnnnnnnnnnnnnnnnnnnnnnnnnnnnnnnnnnnnnnnnnnnnnnnnnnnnnnnnnnnnnnnnnnnnnnnnnnnnnnnnnnnnnnnnnnnnnnnnnnnnnnnnnnnnnnnnnnnnnnnnnnnnnnnnnnnnnnnnnnnnnnnnnnnnnnnnnnnnnnnnnnnnnnnnnnnnnnnnnnnnnnnnnnnnnnnnnnnnnnnnnnnnnnnnnnnnnnnnnnnnnnnnnnnnnnnnnnnnnnnnnnnnnnnnnnnnnnnnnnnnnnnnnnnnnnnnnnnnnnnnnnnnnnnnnnnnnnnnnnnnnnnnnnnnnnnnnnnnnnnnnnnnnnnnnnnnnnnnnnnnnnnnnnnnnnnnnnnnnnnnnnnnnnnnnnnnnnnnnnnnnnnnnnnnnnnnnnnnnnnnnnnnnnnnnnnnnnnnnnnnnnnnnnnnnnnnnnnnnnnnnnnnnnnnnnnnnnnnnnnnnnnnnnnnnnnnnnnnnnnnnnnnnnnnnnnnnnnnnnnnnnnnnnnnnnnnnnnnnnnnnnnnnnnnnnnnnnnnnnnnnnnnnnnnnnnnnnnnnnnnnnnnnnnnnnnnnnnnnnnnnnnnnnnnnnnnnnnnnnnnnnnnnnnnnnnnnnnnnnnnnnnnnnnnnnnnnnnnnnnnnnnnnnnnnnnnnnnnnnnnnnnnnnnnnnnnnnnnnnnnnnnnnnnnnnnnnnnnnnnnnnnnnnnnnnnnnnnnnnnnnnnnnnnnnnnnnnnnnnnnnnnnnnnnnnnnnnnnnnnnnnnnnnnnnnnnnnnnnnnnnnnnnnnnnnnnnnnnnnnnnnnnnnnnnnnnnnnnnnnnnnnnnnnnnnnnnnnnnnnnnnnnnnnnnnnnnnnnnnnnnnnnnnnnnnnnnnnnnnnnnnnnnnnnnnnnnnnnnnnnnnnnnnnnnnnnnnnnnnnnnnnnnnnnnnnnnnnnnnnnnnnnnnnnnnnnnnnnnnnnnnnnnnnnnnnnnnnnnnnnnnnnnnnnnnnnnnnnnnnnnnnnnnnnnnnnnnnnnnnnnnnnnnnnnnnnnnnnnnnnnnnnnnnnnnnnnnnnnnnnnnnnnnnnnnnnnnnnnnnnnnnnnnnnnnnnnnnnnnnnnnnnnnnnnnnnnnnnnnnnnnnnnnnnnnnnnnnnnnnnnnnnnnnnnnnnnnnnnnnnnnnnnnnnnnnnnnnnnnnnnnnnnnnnnnnnnnnnnnnnnnnnnnnnnnnnnnnnnnnnnnnnnnnnnnnnnnnnnnnnnnnnnnnnnnnnnnnnnnnnnnnnnnnnnnnnnnnnnnnnnnnnnnnnnnnnnnnnnnnnnnnnnnnnnnnnnnnnnnnnnnnnnnnnnnnnnnnnnnnnnnnnnnnnnnnnnnnnnnnnnnnnnnnnnnnnnnnnnnnnnnnnnnnnnnnnnnnnnnnnnnnnnnnnnnnnnnnnnnnnnnnnnnnnnnnnnnnnnnnnnnnnnnnnnnnnnnnnnnnnnnnnnnnnnnnnnnnnnnnnnnnnnnnnnnnnnnnnnnnnnnnnnnnnnnnnnnnnnnnnnnnnnnnnnnnnnnnnnnnnnnnnnnnnnnnnnnnnnnnnnnnnnnnnnnnnnnnnnnnnnnnnnnnnnnnnnnnnnnnnnnnnnnnnnnnnnnnnnnnnnnnnnnnnnnnnnnnnnnnnnnnnnnnnnnnnnnnnnnnnnnnnnnnnnnnnnnnnnnnnnnnnnnnnnnnnnnnnnnnnnnnnnnnnnnnnnnnnnnnnnnnnnnnnnnnnnnnnnnnnnnnnnnnnnnnnnnnnnnnnnnnnnnnnnnnnnnnnnnnnnnnnnnnnnnnnnnnnnnnnnnnnnnnnnnnnnnnnnnnnnnnnnnnnnnnnnnnnnnnnnnnnnnnnnnnnnnnnnnnnnnnnnnnnnnnnnnnnnnnnnnnnnnnnnnnnnnnnnnnnnnnnnnnnnnnnnnnnnnnnnnnnnnnnnnnnnnnnnnnnnnnnnnnnnnnnnnnnnnnnnnnnnnnnnnnnnnnnnnnnnnnnnnnnnnnnnnnnnnnnnnnnnnnnnnnnnnnnnnnnnnnnnnnnnnnnnnnnnnnnnnnnnnnnnnnnnnnnnnnnnnnnnnnnnnnnnnnnnnnnnnnnnnnnnnnnnnnnnnnnnnnnnnnnnnnnnnnnnnnnnnnnnnnnnnnnnnnnnnnnnnnnnnnnnnnnnnnnnnnnnnnnnnnnnnnnnnnnnnnnnnnnnnnnnnnnnnnnnnnnnnnnnnnnnnnnnnnnnnnnnnnnnnnnnnnnnnnnnnnnnnnnnnnnnnnnnnnnnnnnnnnnnnnnnnnnnnnnnnnnnnnnnnnnnnnnnnnnnnnnnnnnnnnnnnnnnnnnnnnnnnnnnnnnnnnnnnnnnnnnnnnnnnnnnnnnnnnnnnnnnnnnnnnnnnnnnnnnnnnnnnnnnnnnnnnnnnnnnnnnnnnnnnnnnnnnnnnnnnnnnnnnnnnnnnnnnnnnnnnnnnnnnnnnnnnnnnnnnnnnnnnnnnnnnnnnnnnnnnnnnnnnnnnnnnnnnnnnnnnnnnnnnnnnnnnnnnnnnnnnnnnnnnnnnnnnnnnnnnnnnnnnnnnnnnnnnnnnnnnnnnnnnnnnnnnnnnnnnnnnnnnnnnnnnnnnnnnnnnnnnnnnnnnnnnnnnnnnnnnnnnnnnnnnnnnnnnnnnnnnnnnnnnnnnnnnnnnnnnnnnnnnnnnnnnnnnnnnnnnnnnnnnnnnnnnnnnnnnnnnnnnnnnnnnnnnnnnnnnnnnnnnnnnnnnnnnnnnnnnnnnnnnnnnnnnnnnnnnnnnnnnnnnnnnnnnnnnnnnnnnnnnnnnnnnnnnnnnnnnnnnnnnnnnnnnnnnnnnnnnnnnnnnnnnnnnnnnnnnnnnnnnnnnnnnnnnnnnnnnnnnnnnnnnnnnnnnnnnnnnnnnnnnnnnnnnnnnnnnnnnnnnnnnnnnnnnnnnnnnnnnnnnnnnnnnnnnnnnnnnnnnnnnnnnnnnnnnnnnnnnnnnnnnnnnnnnnnnnnnnnnnnnnnnnnnnnnnnnnnnnnnnnnnnnnnnnnnnnnnnnnnnnnnnnnnnnnnnnnnnnnnnnnnnnnnnnnnnnnnnnnnnnnnnnnnnnnnnnnnnnnnnnnnnnnnnnnnnnnnnnnnnnnnnnnnnnnnnnnnnnnnnnnnnnnnnnnnnnnnnnnnnnnnnnnnnnnnnnnnnnnnnnnnnnnnnnnnnnnnnnnnnnnnnnnnnnnnnnnnnnnnnnnnnnnnnnnnnnnnnnnnnnnnnnnnnnnnnnnnnnnnnnnnnnnnnnnnnnnnnnnnnnnnnnnnnnnnnnnnnnnnnnnnnnnnnnnnnnnnnnnnnnnnnnnnnnnnnnnnnnnnnnnnnnnnnnnnnnnnnnnnnnnnnnnnnnnnnnnnnnnnnnnnnnnnnnnnnnnnnnnnnnnnnnnnnnnnnnnnnnnnnnnnnnnnnnnnnnnnnnnnnnnnnnnnnnnnnnnnnnnnnnnnnnnnnnnnnnnnnnnnnnnnnnnnnnnnnnnnnnnnnnnnnnnnnnnnnnnnnnnnnnnnnnnnnnnnnnnnnnnnnnnnnnnnnnnnnnnnnnnnnnnnnnnnnnnnnnnnnnnnnnnnnnnnnnnnnnnnnnnnnnnnnnnnnnnnnnnnnnnnnnnnnnnnnnnnnnnnnnnnnnnnnnnnnnnnnnnnnnnnnnnnnnnnnnnnnnnnnnnnnnnnnnnnnnnnnnnnnnnnnnnnnnnnnnnnnnnnnnnnnnnnnnnnnnnnnnnnnnnnnnnnnnnnnnnnnnnnnnnnnnnnnnnnnnnnnnnnnnnnnnnnnnnnnnnnnnnnnnnnnnnnnnnnnnnnnnnnnnnnnnnnnnnnnnnnnnnnnnnnnnnnnnnnnnnnnnnnnnnnnnnnnnnnnnnnnnnnnnnnnnnnnnnnnnnnnnnnnnnnnnnnnnnnnnnnnnnnnnnnnnnnnnnnnnnnnnnnnnnnnnnnnnnnnnnnnnnnnnnnnnnnnnnnnnnnnnnnnnnnnnnnnnnnnnnnnnnnnnnnnnnnnnnnnnnnnnnnnnnnnnnnnnnnnnnnnnnnnnnnnnnnnnnnnnnnnnnnnnnnnnnnnnnnnnnnnnnnnnnnnnnnnnnnnnnnnnnnnnnnnnnnnnnnnnnnnnnnnnnnnnnnnnnnnnnnnnnnnnnnnnnnnnnnnnnnnnnnnnnnnnnnnnnnnnnnnnnnnnnnnnnnnnnnnnnnnnnnnnnnnnnnnnnnnnnnnnnnnnnnnnnnnnnnnnnnnnnnnnnnnnnnnnnnnnnnnnnnnnnnnnnnnnnnnnnnnnnnnnnnnnnnnnnnnnnnnnnnnnnnnnnnnnnnnnnnnnnnnnnnnnnnnnnnnnnnnnnnnnnnnnnnnnnnnnnnnnnnnnnnnnnnnnnnnnnnnnnnnnnnnnnnnnnnnnnnnnnnnnnnnnnnnnnnnnnnnnnnnnnnnnnnnnnnnnnnnnnnnnnnnnnnnnnnnnnnnnnnnnnnnnnnnnnnnnnnnnnnnnnnnnnnnnnnnnnnnnnnnnnnnnnnnnnnnnnnnnnnnnnnnnnnnnnnnnnnnnnnnnnnnnnnnnnnnnnnnnnnnnnnnnnnnnnnnnnnnnnnnnnnnnnnnnnnnnnnnnnnnnnnnnnnnnnnnnnnnnnnnnnnnnnnnnnnnnnnnnnnnnnnnnnnnnnnnnnnnnnnnnnnnnnnnnnnnnnnnnnnnnnnnnnnnnnnnnnnnnnnnnnnnnnnnnnnnnnnnnnnnnnnnnnnnnnnnnnnnnnnnnnnnnnnnnnnnnnnnnnnnnnnnnnnnnnnnnnnnnnnnnnnnnnnnnnnnnnnnnnnnnnnnnnnnnnnnnnnnnnnnnnnnnnnnnnnnnnnnnnnnnnnnnnnnnnnnnnnnnnnnnnnnnnnnnnnnnnnnnnnnnnnnnnnnnnnnnnnnnnnnnnnnnnnnnnnnnnnnnnnnnnnnnnnnnnnnnnnnnnnnnnnnnnnnnnnnnnnnnnnnnnnnnnnnnnnnnnnnnnnnnnnnnnnnnnnnnnnnnnnnnnnnnnnnnnnnnnnnnnnnnnnnnnnnnnnnnnnnnnnnnnnnnnnnnnnnnnnnnnnnnnnnnnnnnnnnnnnnnnnnnnnnnnnnnnnnnnnnnnnnnnnnnnnnnnnnnnnnnnnnnnnnnnnnnnnnnnnnnnnnnnnnnnnnnnnnnnnnnnnnnnnnnnnnnnnnnnnnnnnnnnnnnnnnnnnnnnnnnnnnnnnnnnnnnnnnnnnnnnnnnnnnnnnnnnnnnnnnnnnnnnnnnnnnnnnnnnnnnnnnnnnnnnnnnnnnnnnnnnnnnnnnnnnnnnnnnnnnnnnnnnnnnnnnnnnnnnnnnnnnnnnnnnnnnnnnnnnnnnnnnnnnnnnnnnnnnnnnnnnnnnnnnnnnnnnnnnnnnnnnnnnnnnnnnnnnnnnnnnnnnnnnnnnnnnnnnnnnnnnnnnnnnnnnnnnnnnnnnnnnnnnnnnnnnnnnnnnnnnnnnnnnnnnnnnnnnnnnnnnnnnnnnnnnnnnnnnnnnnnnnnnnnnnnnnnnnnnnnnnnnnnnnnnnnnnnnnnnnnnnnnnnnnnnnnnnnnnnnnnnnnnnnnnnnnnnnnnnnnnnnnnnnnnnnnnnnnnnnnnnnnnnnnnnnnnnnnnnnnnnnnnnnnnnnnnnnnnnnnnnnnnnnnnnnnnnnnnnnnnnnnnnnnnnnnnnnnnnnnnnnnnnnnnnnnnnnnnnnnnnnnnnnnnnnnnnnnnnnnnnnnnnnnnnnnnnnnnnnnnnnnnnnnnnnnnnnnnnnnnnnnnnnnnnnnnnnnnnnnnnnnnnnnnnnnnnnnnnnnnnnnnnnnnnnnnnnnnnnnnnnnnnnnnnnnnnnnnnnnnnnnnnnnnnnnnnnnnnnnnnnnnnnnnnnnnnnnnnnnnnnnnnnnnnnnnnnnnnnnnnnnnnnnnnnnnnnnnnnnnnnnnnnnnnnnnnnnnnnnnnnnnnnnnnnnnnnnnnnnnnnnnnnnnnnnnnnnnnnnnnnnnnnnnnnnnnnnnnnnnnnnnnnnnnnnnnnnnnnnnnnnnnnnnnnnnnnnnnnnnnnnnnnnnnnnnnnnnnnnnnnnnnnnnnnnnnnnnnnnnnnnnnnnnnnnnnnnnnnnnnnnnnnnnnnnnnnnnnnnnnnnnnnnnnnnnnnnnnnnnnnnnnnnnnnnnnnnnnnnnnnnnnnnnnnnnnnnnnnnnnnnnnnnnnnnnnnnnnnnnnnnnnnnnnnnnnnnnnnnnnnnnnnnnnnnnnnnnnnnnnnnnnnnnnnnnnnnnnnnnnnnnnnnnnnnnnnnnnnnnnnnnnnnnnnnnnnnnnnnnnnnnnnnnnnnnnnnnnnnnnnnnnnnnnnnnnnnnnnnnnnnnnnnnnnnnnnnnnnnnnnnnnnnnnnnnnnnnnnnnnnnnnnnnnnnnnnnnnnnnnnnnnnnnnnnnnnnnnnnnnnnnnnnnnnnnnnnnnnnnnnnnnnnnnnnnnnnnnnnnnnnnnnnnnnnnnnnnnnnnnnnnnnnnnnnnnnnnnnnnnnnnnnnnnnnnnnnnnnnnnnnnnnnnnnnnnnnnnnnnnnnnnnnnnnnnnnnnnnnnnnnnnnnnnnnnnnnnnnnnnnnnnnnnnnnnnnnnnnnnnnnnnnnnnnnnnnnnnnnnnnnnnnnnnnnnnnnnnnnnnnnnnnnnnnnnnnnnnnnnnnnnnnnnnnnnnnnnnnnnnnnnnnnnnnnnnnnnnnnnnnnnnnnnnnnnnnnnnnnnnnnnnnnnnnnnnnnnnnnnnnnnnnnnnnnnnnnnnnnnnnnnnnnnnnnnnnnnnnnnnnnnnnnnnnnnnnnnnnnnnnnnnnnnnnnnnnnnnnnnnnnnnnnnnnnnnnnnnnnnnnnnnnnnnnnnnnnnnnnnnnnnnnnnnnnnnnnnnnnnnnnnnnnnnnnnnnnnnnnnnnnnnnnnnnnnnnnnnnnnnnnnnnnnnnnnnnnnnnnnnnnnnnnnnnnnnnnnnnnnnnnnnnnnnnnnnnnnnnnnnnnnnnnnnnnnnnnnnnnnnnnnnnnnnnnnnnnnnnnnnnnnnnnnnnnnnnnnnnnnnnnnnnnnnnnnnnnnnnnnnnnnnnnnnnnnnnnnnnnnnnnnnnnnnnnnnnnnnnnnnnnnnnnnnnnnnnnnnnnnnnnnnnnnnnnnnnnnnnnnnnnnnnnnnnnnnnnnnnnnnnnnnnnnnnnnnnnnnnnnnnnnnnnnnnnnnnnnnnnnnnnnnnnnnnnnnnnnnnnnnnnnnnnnnnnnnnnnnnnnnnnnnnnnnnnnnnnnnnnnnnnnnnnnnnnnnnnnnnnnnnnnnnnnnnnnnnnnnnnnnnnnnnnnnnnnnnnnnnnnnnnnnnnnnnnnnnnnnnnnnnnnnnnnnnnnnnnnnnnnnnnnnnnnnnnnnnnnnnnnnnnnnnnnnnnnnnnnnnnnnnnnnnnnnnnnnnnnnnnnnnnnnnnnnnnnnnnnnnnnnnnnnnnnnnnnnnnnnnnnnnnnnnnnnnnnnnnnnnnnnnnnnnnnnnnnnnnnnnnnnnnnnnnnnnnnnnnnnnnnnnnnnnnnnnnnnnnnnnnnnnnnnnnnnnnnnnnnnnnnnnnnnnnnnnnnnnnnnnnnnnnnnnnnnnnnnnnnnnnnnnnnnnnnnnnnnnnnnnnnnnnnnnnnnnnnnnnnnnnnnnnnnnnnnnnnnnnnnnnnnnnnnnnnnnnnnnnnnnnnnnnnnnnnnnnnnnnnnnnnnnnnnnnnnnnnnnnnnnnnnnnnnnnnnnnnnnnnnnnnnnnnnnnnnnnnnnnnnnnnnnnnnnnnnnnnnnnnnnnnnnnnnnnnnnnnnnnnnnnnnnnnnnnnnnnnnnnnnnnnnnnnnnnnnnnnnnnnnnnnnnnnnnnnnnnnnnnnnnnnnnnnnnnnnnnnnnnnnnnnnnnnnnnnnnnnnnnnnnnnnnnnnnnnnnnnnnnnnnnnnnnnnnnnnnnnnnnnnnnnnnnnnnnnnnnnnnnnnnnnnnnnnnnnnnnnnnnnnnnnnnnnnnnnnnnnnnnnnnnnnnnnnnnnnnnnnnnnnnnnnnnnnnnnnnnnnnnnnnnnnnnnnnnnnnnnnnnnnnnnnnnnnnnnnnnnnnnnnnnnnnnnnnnnnnnnnnnnnnnnnnnnnnnnnnnnnnnnnnnnnnnnnnnnnnnnnnnnnnnnnnnnnnnnnnnnnnnnnnnnnnnnnnnnnnnnnnnnnnnnnnnnnnnnnnnnnnnnnnnnnnnnnnnnnnnnnnnnnnnnnnnnnnnnnnnnnnnnnnnnnnnnnnnnnnnnnnnnnnnnnnnnnnnnnnnnnnnnnnnnnnnnnnnnnnnnnnnnnnnnnnnnnnnnnnnnnnnnnnnnnnnnnnnnnnnnnnnnnnnnnnnnnnnnnnnnnnnnnnnnnnnnnnnnnnnnnnnnnnnnnnnnnnnnnnnnnnnnnnnnnnnnnnnnnnnnnnnnnnnnnnnnnnnnnnnnnnnnnnnnnnnnnnnnnnnnnnnnnnnnnnnnnnnnnnnnnnnnnnnnnnnnnnnnnnnnnnnnnnnnnnnnnnnnnnnnnnnnnnnnnnnnnnnnnnnnnnnnnnnnnnnnnnnnnnnnnnnnnnnnnnnnnnnnnnnnnnnnnnnnnnnnnnnnnnnnnnnnnnnnnnnnnnnnnnnnnnnnnnnnnnnnnnnnnnnnnnnnnnnnnnnnnnnnnnnnnnnnnnnnnnnnnnnnnnnnnnnnnnnnnnnnnnnnnnnnnnnnnnnnnnnnnnnnnnnnnnnnnnnngatcctttacacagaacagatttgaaacactctttttgtggaatttccaagtggagatttcagccgatttgaagtcaatcgtagaaaaggagatatcttcgtataaaaacaagacagaatgattttcagaaactgctttgtgatgtgtgcgttcaactcacagagtttcaactttcttttcatagagcagttaggaaacactctgtttgtaaagtctacaagtggatattcagacctctttgaggccttcgttggaaacgggatttctttatattatgctagacagaagaattctcagtaacttccttgtgttgtgtgtattcaactcacagagttgaacggttctttacacagagcagatttgagacactctttttgtggaatttgtaagtggagatttcagccgctttgaggtcagtggtagaaaaggaaatatcttcgtataaaaactagacagaatgattctcagaaactgctttgtgatgtgtgcgttcaactcacagagtttaaccttccttttcatagagcagttaggaaacactctgtttgtaaaatctgcaattggatattcagacctctttgaggccttcgttgcaaacgggatttctttatgttatgctacacagaagaattctcagtaactttcttgtgttgtgtgtattcaactcacagagttgaacgatcctttaaacagggcagattttaaacacactttttgtggaatttgcaagtggagattacagacgctttgtggtcaatggtagaaaaggaaataccttcgtataaaaacaagacagaaactcctttgtgatgtgtgcgttcaattcacagagtttaacctttcttttcatagagcagttaggaaacactctgtttgtaatgtctgcaagtggatattcggacctctttgaggccttcgttggaaacgggatttcttcatattatgctagaaagaagaattctcagtaacttctttgtgttgtgtgtatgcaactcacagagttcaaccttcctttagacagagcacatcggaaacactctttctgagggatttgcaagtggagatttcaagcgctttgattccaaaggcacaaaaggaaatattttcgcaaaaaactagacagaatcattctcagaaccggttctgtgatgtgtgcgttcaactcactgagcttaacttgtcttttcattcagcagtttggaaacactctgtttgtcaagtctgcaagtggatattcggacctctttgaggccttcgttggaaacgggatttcttcatattacactagacagaagaattctcagtaacttccttttgttgtgtgtattcaactgacagagttgaaccttcccttagacagagcagatttgaaacactctttttgtggggtttgcaagtggagatttaaagcgctttgaggccaaaggcagaaaaggaaatatcttcgtataaaaactagacagaatcattctcagaaactgctgtgtgatgtgtgctttcaactcagagagtttaacttttcttttcattcagcagtttggaaacactctgtttgtaaagtctgcaagtggatatattgacctcttagggtccttcgttggaaacgggttttttttcatgtaaggctagacagaagaattcccaataacttccttgtgttgtgtgcattcaactcacagagttgaacgttcttttagacagagcagatcggaaacaatctttttgtgcaatttgcaggtggagatttcaagcgctttaaggtcaatggcagaaaaagatatatatcttcatttcaaaactagacagaatcattccaaaaagtgcattgtgatgtgtgcgttcaactcacagagtttaacctttgttttcatataaccgattgtaaacgctctgattgtcaagtctgcaagtggatattccgacctttttgtggccttagttggaaacgggatttcttcataaaatactacacagaagaattatcagtaacttgcttgtcttgtgtgcattcaactcacagatttgaaagatcctttacacagagcagatttgaaacactctttttgtggaatttgtaagtggagatttcagccgctttgaggtcaatggcagaaaaggaaatatcttcgtataaaaactagacagaatgattctcagaaactgcgctgtgatgtgtgcgttcaactcacagagtttaacctttcttttcatagagccgtttggaaacactctgtttgtcaaggctgcaagtggatattctcacctctttgtggccttcgttgaaacgggatttcttcatataatgctagacagaagaattctcagtaacttccttctgttgtgtgtattcaactcacagatttgaaagatcctttacacagagcagatttgaaacactctttttgtggaatttgcaagtgcagatttcaagcgcttggaggccaattgtagaaaaggaaatatcttcgtataaaaacaagacaaaatcattcccagaaactgcgtagtgaggtgtgtgtttaactcacagagtttaacctttcgtttcatacagcattttggaaacactctgtttgtaaagtctgcaagtggatatttggatctcttagatgccttcgttggaaacgggatttcttcatataatgctacagggaagaattcttagtaacttctttgtgttgtgtgtattcaactgtcagatttgaaccttcatttagacagagcagatttgaaacactctttttgtggaatttgcaaatgcagatttcaagccctttgaggccaaacgcagaaaagcaaatatcttcgtataaaaactagactgaatcattctcagaaactgctctgtgctgtgtgcgttcaactcacagagtttaagttttcttttcattcagcagtttggaaacgctctgtttgtaacgtctgcaagtggatattttgacctctttgaggccttcgttggaaacgggatttcttcatataatgctagagggaagaattcttagtaacttcttcgtgttgtgtgtattcaactgtcagagttgaaccatcatttagacagagcagatttcaaacactctttttgtggaatttgcaaatgcagatttcaagtcctttgaggccaaacgcagaaaaggaaatatcttcgtataaaaactaggcagaatcattctcagagactgctctgtgctgtgtgcgttcaactcacagtgtttaagttttcttttcattcagcagtttggaaatgctctgtttgtaacgtctgcaagtggatattttgacctctttgaggccttcattggaaacggatttttttcaggtaaggctatacagaagaattcttattaacttccttgtgttgtgtgtattcaactctcagaattgaattttcttctagacacagcagatttaaaacactctttttgtgcaatttgcaagtggagatttcaagcgctttgattccaatagtagaaaagggaatatcttcgcataaaaactagacaaaatcattcccagaaactgcatagtgatgtgtgtgtttaactcacagagtttaacctttcttttcatacagcattttggaaacactctgtttgtaaattctgcaagtggatatttggacctctttgaggccttcgttcgaaacgggatttcttcatatactgctaaacaaaacaattctaagtcacttctttgtgttgtgtgtattcaactgacagagttaaaccttcctttagacagagcagatttgaaaccctccttctgtggaatttgcaagtggcgatttcaagcgctttaaggtcaatggcagaaaaggaaacatcttcgtttaaaaactagacaaaatcattcccagaaactgcgttgtgatgtgtgcgttcaactcaaaaagtttaacctttcttttcatagagccgtttggaaacactctgtttttgaagtctgcatgtggatattcggacctctttgaggccttcgttagaaacgggatttctttatattatgctagacaaaagaattctcactaacttctttgtgttgtgtgtgtgcaactcacagagttcaaccttcttttagacagagcagatttgaaatactctttttttggaattggcaactggaagtttcaagcgcttagaggccaatggtagaaaaggaaatatcttcgtataaaaacaagacaaaatcattctcagaaactccgtagtgatgtgggtgttttactcacagagtttaacctttcttttcatacagctttttggaaacactctgtttgtaaagtctggaagtggatatttggaccacttgtatgcctcctttggaaacgggatttcttcatataatgctggagagaagaattcttagtaacttcttcgtgttgtgtgtattcaactgacagatttgaaccttcctttagacagaggagatttaaaacactctttttgtggaatttgcaagtagagatttcaagcgctttgaggccaatggcagaaaaggaaatatcttcgtataaaaactagacagaatcattttcagaaactgctctgtgatgtgtgtgttcaactcagagagtttaacttttcttttcattccgcagtttggaaacactctgtttgtaaagtctgcaagtggatattttgacctctttgaggccttcgttggaaacgggtttttttcttgtaaggctagacagaagaattctcagtaacttccttgtgttgtgtgtattcaactcacggagttgaacgttcctttagagagagcagacttgaaactctctttttgtggaatttgcaagtggagatttcaagagctttgttgccaatggtagaaaaggaaatatcttcgcataaaaactagacaaaatcattcccagaaactgcgtagtgatgtgtgtgtttatctcccagagtttaacctttcttttcataccgcattctggaaacactctgtttgtaaagtctgcaagtggatatttggacctcttagatgccttcgttggaaatgggatttcttcatataatgctagacagaagatttctcagtaagttcttcatgttgtgtgtattcaactctcagatttgaacgttcctttagacacagcagatttgaaacactctatttgtggaatttgcaagtggagatttcaagcgctttgaggccaacggtaaaaaaggtaataaattcgtttaaaaactacacagaatcattcgcagaaactgcgttgtgctgtgtgcgttcaattcacagagtttaacctttcttttcattcaacagtttggaaacactctgtttgaaaagtcttcaagtggatatttggacctccttgaggcgttcgttggaaacgggatttcttcatatagggttagacagaagaattctctgtaatttccttttgttgtgtgtattcaactcacagaggtgaacgttcctttagacagacagatttgaaacactctttttgtggaatttgcaagtggagatttcagccgctgtgaggtcaatggtagaaaacgaaatgtcttcatataaaaactatacagaatgattctcagaaacttctttgtcatgtgtgagttgaactcacagagtttaacctttcttttcattcagcagtttggaaacactctgtttataaagtctgtaagtggatattttgacctctttgaggccttcgttttaaacgggtttttttcatgtaaggctagacagaagaattctcagtaacttccttgtgttgtgtgtattcaactcacagatttgaacgttcctttagacagaggagatttgaaacactctcattgcggaatttgcaagtgggatttcaagcgctttgaggccaacggtagaaaaggaaatatcttcgtttcaaaactagacagaatcattcccacaaactgcgttgtgatgtgtgcgttcacctcacggaccttaacctttcttttcatagagcagtttggaaacactctgtttgtaaactctgcaagtggatatttggacctattagacgccttcgttggtaacgtgatttcttcatataatgctaaacagaagaattgtcagtaacctccttttgttttgtggattcaacccacagagatgaacattcctttagacagagcagatttcaaacacactttttgtggaatttgcaagtggagatttcaagcgctttgaggccaattgtagaaaaggaaatatcttcgtataaaagctagacagaatgattcccagaaactgcgttgtgatgtgtgcgttcaagtcacagagtttaacttttcttttcattgagcagtttggaaacactctgtttgtaaagtctgcaagtggatatttggatctagtagaggccttcgttggaaacgtattttgttcatgtaacgctagacagaagaattctcagtaacttccttgtgttgtgtgtattcaactcgcagagttgaacggtcctttagacagagcagatttcagacactcattttgtggaatttgcaagtggagatttcaagcgctttaagctcaatggcagtaaaaggaatatcttcgttgaaaaaatagacagaatcattcccacatagtgcgttgttatgtgagcgttcaactcacagagtttaactattcttttcatagagcagttaggaaacactctgtttgtaaagtctgcaagtggatattttgacctctttgaggccttcgttggaaacgggtttttttcatgtaaggctagacagaagaattcttagtaacttccttgtgttgtgtgtgttcaactcacagagttgaacgtttctttagacagagcagatttgaaacactgtttttgtggaatttgcaagtggagatttcaagcgatttaaggtcaatggcagaaaaggaaatatcttcgtttcaaaactagacagaatcattcccggaaactgcgtagtgatgtgtgtgtttaactcacagagtttaacctttcttttcattctgcagtttggtaacactctgtttgaaaaatctgcaagtggatattttgacctccttgaggcgttcgttggaaacgggatttcttcatataaggcacgacagaagaattctcagtaacttccttgtgttgtgtgtattcaactcacagagttgaacgttcctttagacagagcagatttgaaacacgctttttgtggaatttgcaagtggagatttcaagcgatttaaggtcaatggcagaaaagggaatatcttcgtttaaaaactagacaggatcattcccacaaactgcgttatgatgtgtgcgttgaactcactttgtttaacctttcttttcatagagccatttggaaacactctgtttgtcaagtctgcatgtggatattcggtcctctttttggccctcgctggaaacgggatttcctcatataatgctagacagaagaattctcaataacttccttgtgttgtgtgtattcatatcacagttttgaacgttcctttagacagagcagatttgaaacactctttttgtggaatttgcaagtggagaattcagccgctttgaagacaatgttagaaaaggaaatatcttcgtagaaaaactagacagaatgattatcagaatctgcttggtgatgtgtgcgttcaactcacagactttaatctttcttttcatagagcagttaggcaacactctgtttgtaaagtctgcaagtggatattcggacctctttgaggccttcgttggaaacgggatttcttcatatagtggtagacgaaagaattcttagtaccttctttgtgttgtgtttatgcaactcaccgagttgaaccttcctttatacagagcagatttgaaacactctttttgtggaatttgtaagtggagatttcaagcgatttgaggccaatggtagaaaaggaaatatcttcatataaaactagaaagaatcattccccaaaactgcatggtggtgtgtgcgtcaactcacagttttacgtttgttttcatagagcagttgggaaacactctgtttgtaaagtcttcaagtggatatttttacctccttgagaccttcgttggaaacgggatttctttatataatgctagacagaggaattctcagtgacttccttttggtgtgtgcattcaactcacagagttgaaccttcctttagacagagcagatttgagacactctttttgtggaatctgcaagtggaaatttcaagagcttggaggccagtgttagaaaaggaaatatcttcgtataaaaactagacagaatcattcccagaaactgcgttgtgatgtgtgcatttaactcacagagtttaacctttcttttcattcagcagtttggaaacactctgtttgaaaattctgcaagtggatatttggacctccttgaggcgttcgttggaaacgggatttcttcatataaggctagacagaagaattctcagtaacttccttgtgttgtgtgtattcaactcacagagttgaaccctcctttagacagagcagatttgatacactctttttgtggaatttggaagtggagctttcagccgctttgaggccaactgtagaaaaggaaatatgttcgtataaaagctagacagaatcactcccagaaacttcgttgtgatgtgtgtgttcacctcacatagtttaacctttcttttcattgagcagtttggaaacactttgtttgtaaagtctgcaagtggatatttggacctagtagagcccttctttggaaacaagatttcttcatataatgctagagagaagaattctcagtaacttcattttgttgtgtgtattcaactcacagtggtgaactttcctttagacagagcagagttgaatcttccttttgatagagctgtttttactctttttattgaatatgcaagtggatatttggagtgctttggagccttcgttttaaaaggtaatatattcacataaaaactagacagaagcattctcagaagcttctttttgatatgtgcactcaactcacagagttgaacctgccttttgatagagcagttttgaaacgctcttttgttgtatctggaagtggatatttggagtgctttgaagccttcattggaaacgggaatatattctcattaaaactagacagaagcattctcagaaacttccttgtgatgtgtgcgttcaactcacagagttgaacctttgctttggtgtagaagttttgaaacactctttttgtagaatctgcagttggatatttgtagctctttgaagcctatggtagaaaaggaaatatctacacataaaaactagacagaagcattctcagaaacttctttgtgatgtgtgcttacaaatcccagaatttaaactttttttttgacagagcagttttgaaacactcttcttgtagtatttgcaagtggataattggattaccttgaagccttggtggaaatggaaatattttccaataaaatctagacagaagcattgtcaaaaactcctttgtgacgtgtacattcaactcacagaattttacatatctcttaacagagcagttttgaaacccactttttgtagaatctgcaagtggatatttggagcaatttgtgggtatggtggaaaaggaaataccttcacataataactagacagaagctttcagaaacttctttgtgatatgtgcattcaattcacagagttgaacctttcctttgatagagcagttttgaaacactctttttgatgaatctgtaattggatatttggagtgcattgtggcctatggtagaaaaggaaatatcttcacataaaaactagacagaaaaattctcaaaaacctctttctgatgtttgcattcaactcacagagttaaaaatttcttttgatagagcagttttgaaacactctttttgcagaatctgcaagtggatatttggacagctttgaggcctttgttttatttttatttttatttttttaaatgaaaaatatttatttattataaacctattttgtttgtttgttttttattatactttaagttttagggtacatgtgcacattgtgcaggttagttacatatgtatacatgtgccatgctggtgcactgcacccactaactagttatctagcattaggtatgtctcccaatgctatccctctcccctcccccaaccccaccacagtccccagagtgtgatattccccttcctatgtccatgtgatctcattgttcaattcccacctatgagtgagaatatgcagtgtttgatttttttgttcttgctatagtttactgagaatgatgatttccaatttcatccatgtccctacaaaggacatgaactcatcattttttatggctgcatagtattccatggtgtatatgtgccacattttcttcatccagtctataattgttggacatttgggttggttccaagtctttgctattgtgaataatgccgcaataaacatacgtgtgcatgtgtctttatagcagcatgatttatagtcatttgggtatatacccagtaatgggatggctgggtcaaatggtatttctagttctagatccctgaggaatcgccacactgacttccacaatggttgaactagtttacagtcccaccaacagtgtaaaagtgttcctatttctccacatcctctccagcacctgttgtttcctgactttttaatgattgccattctaactggtgtgagatggtatcttattgtggttttgatttgcatttctctgttggccagtgatgatgagcattttttcatgtgttttttggatgcataaatgtcttcttttgagaagtgtcttttcatgtccttcacccactttttgatggggttgtttgtttttttcttgtacatttgtctgagttcattgtagattctgtatattagccctttgtcagatgagtaggttgcgaaaattttctcccattttgcagttttgaaacaatctttttgtacaatctgaaagtggataattcgagtacttagaagccttctttggaaacgggaatatcttcacataaaaattagacagatgcattttcagaaactactttgtgatggtagcattcaactcagagagttgaaacctccttttgatagatctgttttgaaaggctctttttgtagaatctgcaagtggatatttggagcgctttgaggcctgtggtagaaaaggaaatatcttcataaaaaaaatagacagacgtattctcagaaactacttcatgatgtgtgcattcaacacagagactttaacctttcttttgatagaggaactttgaaacactctttttatagaatctgcaaagggacatttggagcactttgacggataccgtggaaaaggaaatatcttcacataaaaacgagtcagaagtgttctcagaaacttctttgtgttgtttgcattcaactcacagagttgaaactttcttttcattgagcagttttgaaacactctttttgtagaatccgcaagtggatatttggactgctttgaggccttcattgtaaatgggaatatcttcacataaaaactagacagaagcattctcagaaacttctttgtgatgtgggcattcacctcaaagtgttgaaccttcttttgatacagcagttttgaaaaactctttttgtggtatctgcaagtggatatttggagcgtgttgaggccttcgtttgaaacgagaatatcttcacataaaaaccagacagaagcattatcagaaacttctttgtgatgtgtccattcaactctcagagttgaaccttccttttgatagagcagttttgaaatactttttttgaaggacatgcaagtgtatatttggagtgttttgaagccttcattggaaacaggaatatcttcacataaaaactagatggaagcattctccaaaacttctttgtgatgtgtgcattggtagagcagatttgaaacactctttttggagaatctgcaagaggatatttggagccctttaaagcctatggtagaaaaggaaatttctttatacaaaaactggaaagaagaattctcagaaattagtttttgatgtgtacattcaactcacaaattttaagctttcttttgatacagcagttttgaaacactctttttatagaatctgcaagtggatatttggactactttgagaccttcgtcggaaacgggaatatctttacataaaaactagacagaggcattctcagaaaatactttgtgaagtgtgtattcaactcacagagttgaactttccttatgatagtgcagttttgaaacacactttttgtagaatctgcagttggatatttggactgctttgaagccttctttggaaatgggaatatcttcacataaaaactaggcagaagcattctcagaaacttcattgagatgtgtgcattcaactcacagagttcaaccccactttggatagagcagttttgaaacactctttttgtagaatctgcaagtggatatttggaatcttcagaagcctatggtggaaaaggaaatgtcttcatataaaaactagaaagaaacattctcagaaactacttagtgatgtgtgcttacaactcacagaatttaacctttcttttgaaagagcagttttgaaacactcttcttgcagaatgtgctagtggataattggagtgctttgaaggctttgttggaaacgggaatatcgtcacaagaaaaatagacagaagcattctcaaaaactgcattgtgatgtgggcattcatctcacagagttaaacttatctttttacagaacagttttgaaacactctttttgtagtatctgccattggatatttgggacgctttgaagcctttcttggaaacgggaatatattcacaaaaaactagacagaagcattctcagaaacttccttgtgatgtgtgtattcaactcacagagttgaacgttctttttgaaagatcagttttgaaacactccttttgtagtatctgcaagtggattattggagtactttgaagtcttcattggaaacgggtatatcttcacataaaaactagaagatgcattctcacaaacttcattgtgatgtgtccattcaagtcacagagctgcaccttccttttcatagagcagttttgaaagagtctttttgtagtatctgcaagtggatacttgtagtggtttcaagccttcaatggaaacgggaatatctccaaataaaaaaaagacagaagcattctcaggaacttccttgtgatgtgtgcattcaactcacagagttgaacctgccttttattagagcagttttgaaacactctttttgtagaatctgcaagttgatcattggggtactttgaagtcttcgttggacacgtgtatatcctcacatgaaaactagacagaagtattctcagaaacttcttttagatatgtgcatttacctcatagagttgaaccttccttttgatagagcagttttgaaacgctctttttgtagtatctgcaagtggatatttggagtgctttaagccttcatcggaaacgggaatatattcacataaaaactagagagaagcattctcaaaaacttccttgtgatgtgtgcattcaactcacagagttgaatcttccttttgatagagccgttttgaaacactctttttgtaaaatctgcatgtggataattggagtgctttgaagtcttcgatgaaaacgggtatatcttcacataaaaactagaaagatgcattctcagaaacttctttgtgatgtgtccattcaactcacagagctgaaccttcctttagatagagcaattttgaaagagtctttttgtagtatctgcaagtgggtatttttagtggtttgaagcctttgttggaaaagtgaatagctcaaaataaaaactagacagaagcattctcagtaacttccttctgatgtgtgcattcaactcacagagttgaaccttccttttgatagagcagttctgaaacactctttttgtagcatctgcacgtggataattggagtaatttgcagtcttcgttggaaacgggaatatattcacataaaaactagacagatgccttctcagaaacttctttgtgatgtgtccattcaactcacagagctgaaccttccttttgatagagcagttttgaaagagtatttttgtagtgtctgcaagtggatatttggagtgctttaagccttcattggaaacgggaatatattcacataaaaactagacagaagcattctcagaaacttccttgtgatgtgttcattcaatgcacagagttgaatcttccttttgatagagcagttttgaaacactctttttgtagaatctgcaagtgcatcattggtgtactttgaagtcttcgatgaaaacgggtatatcttcacataaaaactagacagatgcattctcagaaacttctttgtgatgtgtccattcaactcacagagctgatccttccttttgatagagcagttttaacttacaagggatgtgaaggacctcttcaaggagaactacaaaccactgctcaaggaaataaaagatgatacaaacaaatggaagaacattccatgctcatggttaggaagaatcaatatcgtgaaaatggccatactgtccaaggtaatttacagattcaatgccatccccatcaagctaccaatgactttcttcacagaattggaaaaaactactttaaagtgcatatggaaccaaaaaagaacccacatcgccaagtcaatcctaagacaaaagaacaaaggtggaggcatcacactacctgacttcaaactatactacaaggctacagtaaccaaaacagcatggtactggtaccaaaacagagatatagatcaatggaacagaacagagccctcagaaataatgccacatatctacaactatctgatctttgacaaacctgagaaaaacaagcaatggggaaaggattccatatttaataaatggtgctgggaaaactggctagccatatgtagaaagctgaaactggatccgttccttacaccttatacaaaaatcaattcaagatggattaaagagttaaatgttagacctaaaaccataaaaaccctagaagaaaacctaggcaataccattcaggacatagacatgggcagggacttcatgtcgaaaacaccaaaagcaatggcaacaaaagataaaattgacaaacgggatctaattaaacaaaagagcttctgtacagcaaaagaaactaccatcagagtgaacaggcaacctacaaaatgggagaaaacttttgcaacctactcatctgacaaagggctaatatccagaatctacaatgaactcagacaaatttacaagaaaaaaaacaaacaaccccatcaaaaaatgggccaaggacttgaacagacacttctcaaaagaagacatttatgcagccaaaaaacacatgaaaaaatgctcatcatcactggccgtcagagaaatgcaaatcaaaaccacaatgagatactacctcacaccagttagaatggcaatcattaaaatgtcaggaaacaacaggtgctggagaggatgtggagaaatagcaacacttttacactgttggtgggactgtaaactagttcaacctttgtggaagtcagtgtggcgattcctcagggatctagaactagaaataccatttgacccagccatcccattcctgggtatatacccaaaggactataaatcatgctgctataaagacacatgcacacatatgtttattgcggcactattcacaatagcaaagacttggaaccaacccaaatgtccaacaatgatagactggattaagaaaatgtggcacttatacaccatggaatactatgcagccataaaaaatgatgagttcatgtcctttatagggacatggatgaaactggaaatcatcattctcagtaaactatcacaagaacacaaaaccaaacaccgcataatctcactcataggtgggaattgaacaatgagatcacatgggcacaggaaagggaacatcacactctggggactgttgtggggtgcggggagcggggagggatagcattgggagatatacctaatgctagatgactagttagtgggtgcagtgcaccagcatggcacatgtatacatatgtaactatcctgcacaatgagcacgtgtaccctaaaacttaaagtataataatacaagaaaaattaaaaaaaaatccggtaaactaaatgttcacagtgacaattataatagtctaaaagtggaaagaaaccaaatgttcatctattgataaatggttaaacaaaatgtggtatatacatatggaatgtcattttccacaaaaaggaagtgctattgcatgctataacatggatgaacgttgtaaacattatgctaaataaaagaaaccaaatacaaaaggccacatattgtatgattcaagttatatgaaatgtccagaataggcaaaatcatagaaacagatagcaaatttgaggtgccaagggttagaggattggggaattggaggtgactgctgtcagttatgagatttctttttgtggtgatggaaatgttccagaattaggtcatgatgattaacataacactgtgactatactaaaaaaacattaacctgtaaacttgaaaatggtgacttgtatgttatgtgaataatacctaaataattaaaagaagtaaggataataaaatcatcttaatcagccagctatgctagagcaagtaaagctaaatatctttttaggatctagagaaaataaaattataaaattatcatacataaagacaattaatgagtatgcagcaaaaaactattacaaagatgggtcatgcaattctataatttgtaaatgttatttttatcaactgagtggtatatttcaaaaatttaaagcatttttaagtttataattcattgtgtttgttttttcactccaaataaatacctactgtcatgactaaaaaaaaaaaagaaagagtctttttgtagtatctgtaagtggatatttgtagtggtttgaagccttcgttggaaaagggaatatctccaaatgaaaactagacagaagcattctcagaaacttccttgtgatgtgtgcattcaactcacagagttgaaccttccttttgatagagcagttctgaaacactctttttgtagcatctgcacgtggacaattggagtaatttgtagtcttcgttggaaacgggaatatcttcacataaaaactagacagatgccttctcagaaacttctttgtggtgtgtccattcaactcacagagctgaaccttccttttgatagagcagttttgaaagagtctttttgtagtgtctgcaagtggatatttgtattggtttgaagccttggttggaaaagggaatatctccaaataaaaactagacagaagcattctcagaaacttccttgtgatgtgtgcattcaactcacagaattgaaccttccatttgatagagcagttctgaaactctctttttgtagcatctgcacgtggataactggagtactttgatgtcttcattggaaatgggtatatcttcacataaaaaatagaagcattctcaaaaactactttgtgatgtgtgcattcaactcacagatttgaaccttccttttgatagaacagttttgaaacactctttttgtagattctgcaattggatattgggagtgctctgaagtcttcgttggaaacgggaatttctccacataaaaactagacaaaagcattctcagaatcttctttgagttgtttgcattcaactcacagagttgaaactttcttttgatggagcagttttgaaacactctttttgtagaatatgcaagtggatattttgtctgctctgaggaattcgttggaaacgggaatatcttcaaacaaaaactagacagaagcattctcagaaactgctttgtgatgtgtgtgttgaactcacagcgtttaaacttccttttcatagagaagttttgaaacactcttttgtagaatatgaaagtggatatttggagtgctttgaagccttcattggaaaggggaatatcttcacataaaaactagacagaaggattctcagaaacttccttgtgctgtgtgcattccacttacagatttgatccctccttttgaaagaacagttttgaaacattctttttgtagaatctgcagttggatatttggaaccctttgaggcctacggtagaaagggcaatatcttcatataaaaactagaaaaaaaacattctcagaaactactttgtgatgtgtgcattcaagtcacagagtttaacctttcttttgatagagcagttttgaaaaactctttttgtagaatctgtaagtggacatttggagcactttgagggttactgtggaaaaggaaataccttcacataaaaactagacagaagcattctcagaaacttctttgtgatgtttgcattcaactcacagtgttgaacctttcttttcatagagctgttgtgaaacacactttttgtataatctgcaagtggatatttggactgctttgagtccttcattgggaacggaaatatcttcacataaaaactagactgaagaattctgaggaaattctttgtgatgtgtacattcacctcacatagttgaaactttcttttgataaaacagttttgaaactgtttttgcagaatctgcaattggatatttggagtgctttgaggcctatgttagaaaaggaaataccttcatataaaaactagacagaagcattctcagaaactactttgtgatgtgtgcttacaactcgcagaatttaacctttcttttgatatgcagttttgaaacactctttttgaagaatctgcaaggggataatttgagtgctttgaagccttccttgcaaacgggattatcttcacataaaaattagacagaagtattctcaaaaactacattgtgatgtgggcattcatctcacagagtttaaccattcttttgatagggaagttttgaaacactgtttttgtagaatttgcaagttgatagttggaccactgtgaggccttcattggaaaggggaatatcttcacataaaaactacacagaagcattctcagaaacttctttgtggtatgtgcattcaacacacagagctgagtcctccttttcatagagcagttttgaaacactctttttatagtatccgcaagtggatatttcagtgcttggaagccttctttggaaactggaatataataacataaaaagtagacagaagcattgccagaaacttccttgtgatgtgtgcattcaactcacagattttaactttcttttgatagagcagttttgaaacactttttttgtagaatctgcaagtggatattctgactgcttgtaggcattccctagaaacaggtatatcttcacaaaaaaactagacagaagcattctcagaaacttctttgtgatgtttgcattcacctcacagatttgaacctttcttttcatagagcagttttgaaacactcttttggtagtatctgcatgtggatatttggacttcattgaggcctttgttagaaacgggattatcttcacataaaaactagacagaagcattctcagaaacttctttttgatgtgtgcattcaactcactgagttgaaactttcttttgttagagcagttttgaaacactctttttgtagaatctgccattggatatttggagcactttgaggcctatcatagaaaaggaaatagcttcatgtaaaaacaagacagaagcattctcagaaactacttcatgatgtgtgcttacaactcacagaatttaaactttcctttgatagagcagttatgaaaaactctttttgtagaatctgcaagtgggtaattggagtgctttgaagccttcagtgggaacgggaatatcttcacataaaaaaaagacagaagcattctcagaaactactttgtcatgtgattttgaactcacagagttgaaccttccttttgatagagatgttttgaaacactctttttgaaaaatctgcaagtggataattggagtgctttgaagccttcgttggaaatgggaatatcttcacataaaaaccagacagaagcattcttagaaactctttgggatgtgtgtagtcaactcacagagtttaacttatcttttgatagagcagttttgacacatgctttttgtaaaatctacaagtggacatttggagcactttgagcactatggtggaaaaggaaatatcttaacataaaatagacagaagcattctcagaaacttctttgtgatatgtgcattcaacactcagagttgaacctttctttcaatagagtacttctgacacactctttttgttgaatctgcaagtggacatttggggcactttgagggctatgttgaagaaagaaatatcttcacataaaaactagacagaagcattctcagaaacttctttcggtcgtttgcattcaactcagagatttgaacctttcttttgatagagcagttttgaaacactcttttagtagaatcagcacatggatagtttgagtgcttagaatacttcgttggaaaagggaacagcttcacataaaaactagacagaaggattctcagaggctactttgtgatgggtgtgttcaactcagagagttgaacattcctttttgtgcagcagattttaaacactctttttgtagaatctgcaataggatattttcagcctgttgaggcctctggtaggaaaggaaattactttatataaaaactagaagaaagaaatctcagaagctagtttttgatgtgtgcattcaactcacagattttaacctttcttttgatagagcagttttgaaacactctttttgtagaatctgcaagtggatatttttacagctttgaggaattcgttagaaacgggaatatcttcacataaaaactagacaaaagcattctcacaaacttctttgtgatgtttacattcagctcacagtgttgaacttttcttttcatagagcagttttgaagcactctttttgtagtatctgcaagtggatatttggacttttttgaggccttcattggaaacgggaatatctacacataaaaactagacagaagcattctcagaaacttctttgagatgtgtgcattcaactcacagaattgcacctttcttttgatagggcagttttgaaacactctttttgtagaatttgaaattggatatttggagcgctttgaggcctaagttagagaaggaaatatcttcatataaaaactagaccgaagcattctcagaaacaactttgtgatgtgtgcttacaattcacaatataaaacgtttttttttttttttgatatagcatttttgaaacactctttttgtagaatctgcaactggataattggagttctttgaagccttctttggaaacgagaagatcttcacataaaaactagacagaagcattctcaaaaactacattgtggtgtgcgcattcaactcacggagtttaacctatcttttgacagagcagttttgaaacactcttttgtagaatctgcaagtcgacatttggagcactttgagggctatggtggaaaagtaaatatcttcacataaaaactagacagaagcattctcagaaacttctttgtgatgtttgtattgaacccagagagttgaaaatttcttttcacagagcatttttgaagtactctttttgtagaatatgcaaggggatatttgggctgattaggggccttcattggaaacgggaatatcttcacataaaaactagacagaagcattctcagaaacttctttgtgatgtgtgcattcaacacacagagtttaaccattctttttatagagcagtttgaaccactctttttgtagaatctgcagtggacatttgaagcactttgagggctatggtggaaaaagtaatatcttcacaaaaaaactagacaggagcattctcagaaacttctttgtgatgtttgcattcaactcacagagttgaacctttcttttgatagagtagttttgtaactctcgttttgtagaatctgcaagtggatatttggacttctttgagagcttcgtaggaaatgggaatatacaaacagagagaagcattctcaaaaactactttgtgatgtgtgcattcaactcaccgaatttaacctgtcatttgacagagcagatttgaaacactctttttgtagaatctgcaagtggacatttggggcactttgagggctatggtggagatggaaatatcttcacataaaaactagacagaagtattctcagaaactgctttgagatgtttgcattcaactcagagagtcgaacatttcttttgatagagcagctttgaaacattttttttttagaatctgcaagtggatatttggacagctttgaagccttggttggaaacggtaatatcttcccataaaaactagatagaagcattctcagaaacttttttgtaatacgttcattcaactcaaagagttgaaccttccttttgatagagcagttttgaaacattctttttgtagaatctgcaagtggataattggagtacattgaagtcttcattggaaacggatttatcttcacataaaaactacacagatgcattctcagaaacttctctggcacgcgtacattcaactcacagcgttgaacctttctttttatagagcagttttgaaacactctttttgtaaaatctgcaagtagttatttggagtggtttgaagccttccttggaaatgggaatatctccacataaaaaccagacagaagcattctcagaaacatctttgtgatgtgtgcattcaactcacagagttgaaccttccttttgatagagcagttttgaaacactctttttgtagaatctgcaagtggatatttagaaacatttgacgccttcattggaaaagggaatatcttcacataaaaactagacagaaggattctcagaaactactttatgtgtgcattcaactcacagatttgaaccctccttttggtagagtagatttgaaacactgtttttgtagaatctccaagtgggtatttgtagccctctgaggcctctggtagaaaaggcaatttctttatatgaaaattagaacaaagcattctcagaaactagtttgtgatgtgtgcttttaactcacagagtttaacttttcttttgatagaacagttttgaaacactctttctgtagaatctgcaagtggatattttgactgctttgaggaattcattggaaacgagaaaaacttcatataaaaactagacagaagcattctcagaaacttctttgtgatatttgcattcaactcacagagtaaaacctttcttttcatagagcagttttgaaatattctttttgtagaatctgcaattggatacttggagaggtttgaggcctatggtagaaaaggaaatatcttcatataaaaactagacagaagcattctcagaaactacttcgtaatgtgtgcttacaactcacagaatttaacctttcttttgatagaggagttttgaaacactgttttggtagaatctgcaagtggataattagagtgctttgaagctttgttggaagagggaatatcttcacataaaaactagacagaagcattctcaaaaactactttctggtgtatgcattcaactcacagagtttaacctatcttttgacagaacagttttcaaacactgtttttgtagaatccgcaagtggacattttgagcactttttgggctatggtggaaaaggaatatcttcacataaaatcagactgaagcattctcaaaaacttctctgcgatgtttgcattcaacacagagagttgaatatttcttttgatagagcaattttgaaacactttttttggagaatctgcaagtcgatatttgttctgctttgaggccttcattggaaacgggaatatcttcacataaaaactagacagaagcattctcaaaaactacattgtcctgtgtgcattcaactcgcagagattaacatatcttttgacagagcagttttgaaacactctttttgtagaaactgtaagtggacaatttgatcactttgagagctatggtggaaaaaataatatcttcacaaaaaaactagacagaagcattttcagaaacttctttgtgatgtttgctttcaactcactgagttgaaactttcttttcatagaacagttttgaaacactctttttgtggaatctgaaagtggatatttggaccgctttgaggccttcgtaggaaacgggaatatcttcacataaaaactagacagaagcattctcagaaacttctttgtgatgtgtgcattcaactcacagagttgaacttaccttatgatagagcggttttgaaaccctctttttgtagaatctgcaagtggatatttggactcctttgaggccttcataggaaacggaaaaatcttcacataaaaactagacagaagcattctcagaaacgtctttgtgatgtgtgcattcaactcccagagttgaaccttccttttgatagaatctgaaagtggatatttggagtgctttgaagccttcgttgaaaacgggaatatcttaacataaaaaccagacagaagcattctcagaaacttctttgggatgtgtgcattcaactcacagagttgaacatttcttctgatagagctgttttgaaacactctttttgtagaatttgtgagtggatatttggagtgctttgaagcctttgttggaaacgggaataactccacataaaaactagacagaagcattctcagaaacttctttgagatgtgtgacttcaactcacagagtttcacctttctcttgatagagcagttttgaaaccctttttttgtacaatctgcaagtggaaaattggagtgctttgaagctttcgttggaaaggtgtatatcttcacataaaaactagacagaaatattctcagaaacttctttgtgatgcgtgcattcaactcacagagttaaacctttttttgatagagcagttttgaaacaaactttttgtagaatctgcaagtggacatttggagcactttgagggctctggtggaaaaagaaatatcttcacataaaaactagacagatccattttcagaaacttctttgtgatgtctgcattcaactcacagagttgaacctttcttttgatagagcaatttttaaacactctttttgtaggatctgcaagtggacatttggagcactttttgggctatgttggaaaaggtaatattttcacataaaaactagagagaagcattctcagaaacttctttgtgatgttgcattcaactcagagagttgaacatttgttttgatatagcagttttgaaactctctttttgtagaacctgcaagtggacatttggaccgcgttgaggccttcgttggaaacgggaatatcttcacataaaaattaaacagaagcattctcagaagctactttgtgatgtgtgcattcaactcaccaagttgaacattccttttgttagagcagatttgaaacactctttttgtagaatatgcatgtggatatttggagtgctttgaagccttctttggaaacgggaatatcctcacttaagaactagacagaagcattctcagaaacttccttttgatgtgtgcgttcaactcacagagttgaaccttcgttttgatagagcagttttgaagcactcgttttatagaatatgcacgtgggcatttggagcactttgagggctacggtttaaaagaaaacaccttcacaagaaaacttgacagaagcattctcagaaacttcgtcaggatgtttgcattcaagtcatggagttgatactttcttttcatagaacagttttgaaacactgtttttgtagaatctgcaagtggatatttagactgctttgagaccttcttcggaaacgctaatatcttcacataactagacagaagcattctcagaaacttctttctgaagcgtgaattcaactcacagaattgaacttttcttttgataaagcagtttggaaacactatttttgtagaatctgcaattggatatttggagcgctttaaggcttatggtagaagaggagatatcttcatataaaaattacacagaagcattctcagaaactacttagtgctgcgtacctaaaactcacagaatttaacctttcttttgatagagcagttttgaaacaccctttatgtagaatctgcaagtggataattgtagtgatttgaagcattcgttggaaatgggaatatcttcacaaaaactagacagaagcattctcaaaaactactttgtgaggtgggcattcaactcccagagtttaacatatcttttgacagagcagtttgaaacactctttttgtagaatcagcaagtggacttttggagcactttgagggctgtggtgaaaaaaagaaaaaaatcttcacataaaaattagacagaagcattctcagaaacttctttgagatgtttgcattcaactcagagagtcgaacatttcttttgatagagcagttttgaaacactcagtttgtagaagctgcaagtggatatttgcaccactttgaggccttcgttagaaacgggaatatcctcacataaaaactagatagaagaattctcagaaacttctttgtgatatgtgcattcaacccactgagttgaaccttccttttgatagagcagttttgaaacactctttttgtagtatctgcagttcgatatttggagtgctttgaaccctttgttggaaacgggaatatgttcacataaaaactagacagaagcattgtcagaaacttccttgtgatgtgtgcattaaactcatagagttcaacctttcttttgatagagcagttttgaaacactgtttttgtagaatctgcaagtggataaatggagtattttgaggtcttcgttggaaacggttgtatcttcacattaaagctagacagatgcattctcagaaacttctttgtgatgtgtgcatttaactcacagagttgaagctttcttctgataaagcagttttgaaacagtctttttgtaggatctgtaagtggatatttggagtggcttgaagccttcgttggaaacgggagtatctccacataaaaactagacagaagcatactccgaaacttctttgtgatgtttgcattcaactcacatagttgaaactttcttttcatagagcagatttgatacactctttttcagattctgcaagtggatatttggactgccttgaagccttcgtttgaaacgggaatatcttcacataaaaactagacagaagcattctcagaaacttctttgtgatgtgttcattctactcacagagttgaagctttctttcaatagagcaattttgaaacacactttttttagaatctgcaattggatatttggagcgctctgagccctatggtagaaaagcaaatatcttcatacaaaaactagacagaagcattctcagaaactactttgtgatgggtgcttacaactcacagaatttaaccgttcttttgacagagcagttttgaaacactctttttgtagaatctgcaactggatatttggactgccttgaggtctttgttggaaacgggaatatcttcacataaaaactagacagaaacattctcagaaacttccttgtgatgtgtgcattcaactcacagagatgaaacttccttttgatagagtagttttgaaacactttctttgtagaacctgcaagcggataattggagtactttgaaatcttctttggaaatggctatatattcacataaaaactagaccgttgcattctcaggaacttctttgtggatgtgtgcattcaacttaccgatttggagcttccttttgataaagcagttttgaaacactctttttgtacagtctgcaaatttatgtttggagcgctttgaggccagtggtagaaaatgaaatatcttcatataaaaactagatagaagcattctcagaaactactttgtgatgtgtgccttcaactcacagagtttcacccttctcttgatagagcacttttcaaaacctctttttgtagaatctgctagtggagaattggagtgctttgaaggcttcattggaaacaggtatatcttcacatataaactagacggaaacattctcagagaattctttgtgatgcgtgcattcaactcacagagttaagccttttttttaatagagcagttttgaaacacactttttgtagaatctgcaagtggaaatttggagcactttgagggctatggtgcaaacggaaacaccttcacaaaaaaactagacagaagcattctcagaaacttcttcacgatgtttgcattcaagtcacagcgttgaaactttcttttcatagagcagttttgaaacactcttgttgtagaatctgcaagagtacatttggagtactttgaaggatacagtggaaaaggaaatatcttcatataaaaactagactgaagcattctcagaaacttctctgtgatgtttgcattcaactcagagagttaaacatttcttttgatagagcagttttgaaacactgtttttgcagaatctgcaagtcgatatttggacggttttgaggccttcgttgataacggtgtatcttcacataaaaactagacagaagcattgtcagaaacttctttgtgatatgtgcattcaactcacagagttgaacgttctttttcatagagcagttttgaaaccctcttggatatttggagtgctttgaagccttcgctgggagcgcgaatatattcacataaaaactagacaaaagcattctcaaaaacttccttgtgatgtgtgtattcaactcacaaaactgaaccttccttttgatacaagagttttgaaacactctttttgagaatatgcacgtggataatttgactacttggaagccttcgttggaaacgggaatttcttcacgtaaaaactagacagatgcattctgagaatttccttgtgatgtgtgcattcaactcacagagttgaaccttccttttgatagagcagttttgaaaccctctttttgtagaatatgaaaatggataattggagttctttgtagtcttcattggaaacgggaatattttcacataaaaactagacagaagcattctcagaaacttctttgcaatgtgtgcattcacctcacagagttgagccttcctttgatagagcagatttgaaacactctttttgtagaatctgcaggtggatatttggagtgctttaaagccttctttggaaacggtaatatcttcacataaaaactagacagaagtattctcaaaaacttctttgtgatgtgtgcattcaactcacacagttgaaccctccttttgctactgcagatttgaaacactctttttgtagaatctgcaagtggatatttgaagccatttcaggcctctggtagaaaaggtaatttctttatctaaaaactagaaagaagcagtctcagaaaccagctagtgatgtgtgcattcagctcagagatttttaacctctcttttgctagagcagttttgaaacactctttttgtagaatctgcaagtggacatttggagcactttaagggctatgttggaaaaggaaataccttcacataaaaactagacagaaacattctcagaaacttctttgtgatgttcacattcacctcacagatatgaaccattgtggaagtcagtgtggtgattcctcatggatctagacctagaaatgccatttgacccagccatcccattactgggtatatacccaaaggactataaatcatgctgctataaagacacatgcacacatatgtttattgtggcattattcacaatagcaaagacttggaaccaacccaaatgtccaacaatgatagactggattaagaaaatgtggcacatatacaccatggaatactatgcagccataaaaaatgatgagttcatttcctttgtagggacatggatgaaattggaaatcatcattctcagtaaactatcataagaacaaaaaaccaaacaccgcatattctcactcagaggtgggaattgaacaatgagatcacatggacacaggaaggggaacatcacattgtgtggacagttgtggggtgcgggaaagggggagggatagcattgggagatatacctaatgctagatgactagttagtgggtgcagcacaccagcatggcacatgtatacgtatgtaactaacctgcacattgtgcacatgtaccctaaaacttaaagtataatcataaaaaaatgaatttttcttttcataaagcagttttgaatcactctttttgtagaatctgcaagtggatatttggattgctttgaggctttcgttggaaacgggaatatcttcacataaaaactagacagaaagattctcagaaacttctttgtgatatgtgcactcaacacagagagttgatcctttcttttgaaagagccattttgacacacactttttgtagattctacaattggacatttagagtactttctgggctatagtgcaaaaagaaatatcttcacatgaaaagtagacagaagcattctcagaagcttctttgtgatgtgtgcattcaactcacagagtttaaccttccttttgattgagcagttttgaaacattctctttgtagaatctgcaagtggttattaggactactttgaggccttcattggaaatgggaatatcttcacataaaaactataaataagcattctcagaaagttatttgtgaattgtgcattcaactcacagaattgaaccttccttttgatagagcagttttgaaacactctttttttatagtatctgcaagtggatatttggagtgttttgaagccttcgttggaaacgggaatatattcacataaaaactagacagaagcattctcagaaactttcctgtgatgtgtgtattcaatgcacagagttgaaccttccttttgatagagcagttttgagacactctgtttgtagaatatgctagtttatatttggagtgctttgaagccttcgttggaaatgtgaatatcttcacattaaaaactagacagaaggattctcagaaactactttgtgatgtgtgcattcaactcacacagttgaaccctccttttgctactgcagatttgaaacactctttttgtagaatctgcaagtggatatttgaagccatttcaggcctctggtagaaaaggcaatttctttatctaataactagaaagaagcagtctcagaaaccagctagtgatgtgtgcattcagctcagagatttttaacctctcttttgctagagcagttttgaaacactctttttgtagaatctgcaagtggacatttggagcactttgagggctatgttggaaaaggaaatattttcacataaaaactagacagaaacattctcagaaacttctttgcgatgttcacattcacctcacagatatgaaccattgtggaagtcagtgtggtgattcctcaaggatctagacctagaaatgccatttgacccagtcatcccattactgggtatatacccaaaggactataaatcatgctgctataaagacacatgcacacatatatttattgtgacattattcacaatagcaaagacttggaaccaacccaaatgtccaacaatgatagactggattaagaaaatgtggcacatatacaccatggaatactatgcagccataaaaaatgatgagttcatttcctttgtagggacatggatgaaattggaaatcatcattctcattaaactattgcaagaacaaaaaaccaaacaccgcatattctcactcagaggtgggaattgaacaatgagatcacatggacacaggaaggggaatatcacactctgggaactgttgtggggtgcgaggaggggggaaggatagcattgggagatatacctaatgctagatgactagttagtgggtgccgcgcaccagcatggcacatgtatacatatgtaactaacctgcacaatgtgcacatgtaccctaaaatttaaagtataatcataaaaaaaatgaatttttcttttcataaagcagttttgaaacactctttttgtagaatctgcaagtggatatttggattgctttgaggccttcattggaaacgggaatatcttcacataaaaactagacagaaagtttctcagaaacttctttgggatgtgtgcattcaacacacagagttgatcctttctattgaaagagccattttgacatacactttttgtagactctactagtggacatttggagtactttctggactatagtgaataaataaatatcttcacatgaaaagtagacagaagcattctcagaagcttctttgtgatgtgtgcattcaactcacagagtttaaccttccttttgattgagcagttttgaaacactcttttgtagaatctgcaagtggatatttggactgatttgaggccttcgttggaaacgggaatatcttcatctaaacactagacggaagcattctcagaaactactttgtgatgtgtccattcaactcacagtgttgaacctttatttttacagagcagctttgaaacacactttttgtagaatctacaagtggatatttggactgcttggaggccttcattggaaacgggaatatcttcacataaacactagacagaagcattctcagaaactactttgtgatgtgtgcattgaaccccctagttgaaccttgctgttgatggagaagttttgagtcaatctttttctataatatgcaagtgtatattcggagtgttttgaagtcttcattggaaacgggaatatcttcacatgagaactagacgaaagcattctcagaaacttctttgtgatgtgtgcattaaactcacagagttgaaatttccttttgattgagcagttttgaagcactctttttgtagaatctgcaagtggatatttggactgatttgaggccttcgttggaaacgggaatatcttcgtctaaaaactagacagaagccttctcagaaactactttgtgatgtgaccattcaactcacagagtcgaacatttcttttgatagggcagctttgaaacacactttttgtagaagctgcaagtggatatttggactgctttgaggccttcattggaaacggaaatatcttcacataaaaactagacaaaagcattctcagaaactactttgtgatgtgtccattgaactcccctagttgaaccttgcttttgatggagaagttttgaatcactctttttgtagaatatgcaaatggatatttggagtgttctgaagccttcgttggaaacgggaatatcttcacatgaaaactagatgaaagcattctcagaaacttctttgtgatgtgtgcattcaactcacagagttgaaccctccttttgattgagcagttttgtagcactctttttgtagaatctgtaagtggatatttggaacactttgaggcttatggttgaaaaggaaatatcttcatagaaaaactagcaagaagtgttctcagaaactactttgtgatgtgtgcttacgactcacagaatttaacctttcttttgatagaggagttttgaaacagtctttttgtagaatctgctagtggataattggagtgctttgaagcctttgttggaaactagaatatcttcacacatgtactagacagaagcattctcagaaacttgtttgtgatgtttgcattcaactcacagagattaacctttcttttgacagagcagttttgaaacactctttttgtagaatctacaagtggacatttggagcactttgagggctatggtggaaaaggtaatatcttcacataagaactagatagaagcattctccgaaacttctttgtgatgtgtgcattcaacgcacagagcttaactttcctttggaaagaacacttttgaaacactctttttgtagaatctgcatttggatatttggactgctttgaagccttcgttggaaacgggaaaatcttcatataaaaactagacagaagcatgctcggaaacttctttgtgatgtgtgcattcaaaccacagagttgaaccctccttctgatagagaagtttcaaaacactctttttgtagaatctgcaagtggatatttggagccctttgaggccttttgtagaaaaggaaatatcttcatagaaaaactagaaagaagcattctcagaaactattttgtgatgcgtgcattcatatcacagaattgaacgtttcttttgatagagcagttttgaaacactctttttgtcaaatctgcaagtggacatttggagaaatttcagtgctaccatggaaaaggaaatatcttcacataaaaactagacagaagcattcgcagaaaagtctttgtgatgtttgcattcaactcacagatttgaaactttcttttcatttagcagttttgaaacaattttttttgtagaatctggaagacgatatttgtactgctttgaccccttcgttggaaacgggaatagcttcacatgaaaactagacagaagcattatcagaaacttctttgttatgtgtgcattcaactcacagagttcaactttccttttgatagggccgttttgaaaaactcttcctgtagaatctgtaagtgtatatttggactggttttaggccttcattgaaaaagggaatatcttcacataaaaactatacagaagcattctcagaaacttctttgtgatgtgtgcattcatcttacagttttgaaccttccgttgaatggtgcagctttgaaacactctttttgtagaatcagcaattggatatttggagcgatttgagccctattgtagaaaaaggaaatattttcatataaaaactagacagaagtattctctgaaactaatttgtgatgtgtgctttcatctcacagagtttaaactttcttttgatagagcagttttgaaacactctttttgcactatctgcaagtggataattggagtcctttgaagcctttgttggaaacgggaatatcttcatatataaactagacaaaagcattctcaaaatctactttgtgatgtgtgcattcaactcacagagattaacttttcttttgatagatcagctttgaaacactctttttgaagaatctgcaagtagacatttggagcactttgagggctctggtggaaaacgaaatatcttcacatgaaaaccagacagaagcattctcagaaacttctttgtgatgtgtgcattcaactcacagagttgaaactttcttttgatagagcagtttttaaacacactttttgtagaatctgcaagttgacatttggagcactttgaggtctatggtggaaaaagatatatcttcacataaaaactagacaggagccttctctgaaacttctttgtgacgttcggattcaactcacagagttgaaactttcttttgatacagcagctttgaaacactctttttgtagaatctgcaggtggatattttgactgctttgaggccttcgttggaaaagggaatatcttcacataaaaactagacagaagctttctcagaaacttctttgtgatgtgtgcattcaactcacagagttgaaccttccttttgatagagcagttttgaaacaatatttttgtagaatctgcaagtggatatttggagtgctttgaagccttagttggaaacgggaatatcttcatataaatactagacagaagcattctcagaaccttctttgtgatatgtgcattcagctcacagatttgaaccatccttttgatagagaagttttgaaaccctctatttgtagaatctgcaggtggatatttggagcattttgagtcctactgtagaaaaggaaatatcttcatataaaaactagaaagaagcattctcagaaagtactttgtgatgtgtgcattcaactcacagaatttaaactttcttttgatagagcagttttgaaacactctttttgtagaatctgcaagtggataattggagtgctttgaagccttcattggaaacgggaatatcttcacataaaaactagacagaagcattctcagaaactgctttgtgatgtgtgcttgcagctcacggaatttaatctttcttttgatagggcagttttgaaacactctttttgtagaatctgcaagtggataattggattgctttgaagccttcgttgcaaacgggaatatctttaaataaaaatttgtaatgcttacattcaactcacagagtgtaacctatcttttagtagagcagttttgaaacactttttttgtagaatctacaagtgcacagttggagcactttgagggctatagtggaaaaggaaatatcttcacataaaaactagatagaagcattctcagaaagttctttgtgatgtttgcattcaattcatagagttgaacatttcttttgatagagcagttttcaaaaactctttttgtagaatctgcaagtggacatttagagtactttgaggcctatggtggaaaaggaaatatcttcacataaaaattagacagaagcattctcagtaatttctttctgatgtatgcattcaactcagagagttgaacatttcctttgatagaatagttttgaaacactccttttgtagaatctgcaagtggatatttggactgctttgtcgccttcgttggaaatgggaatagcttcacataaaaactagacagaagcattctcagaaacttctttgtgatatgtgcattcaactcacagattttaaccattcttttgatagagccgttttgaaacacttcttgtagaacctggaagttgataattggagtgctttgaagcctccgttgcaaacgggaatatcttcacataaaaactagacctaagcattctgagaaacatttatgtgatgtgcgcattcaactcacagagttgaaccctccttttgatagggcagtattgaatctctctttttgtagaatctggaagtggatatttggagcacattgaggtctatggtagaaaagggaatatcttcacataaaaactagacagaagcattctcagaaactagtttgtgatgtgtgcattcaactcacagagttgaacctttgttttgatagagcagttttgaaacactctttttgtagaatctgcaagtggatatttcgactgctttgaagccttcgttagaaacaggaatatcttcacataaaaactagacagaatcatttcagaaactactttgtgatgtttgcattcatctcagagagttgaacctttcttttgatagaacagttttgaaacaccctttttctagaatctgctggtggacatttggagtactttgtggtcgatggtgaaaaggatatatcttcacataaaaactagacaggaacattctcagaaacttctttgtgatgtttgctttcaacacagggagttgaaactttctgttgatagaggagttttgaaacactatttttggagaatctgcaagtgaatatttagaccactttgaggccttcattggaaacgggaatattttcacataaaaactagatagaagcattctcagaaacttctttttgatgtttgcattcaattcacagaattgaaccttccttttaattgaaaagttttgaaacactctttttgtagaatatgcaattggatatttggagtgctttgaagccttcattagaaacggaaatatcttcacataaaaactagatagaagcattctcagaaacttctttgtgatgtgtgtatacaactcacagatttgaacctttcttttgatacagcagtttttaaacactctttttgtagaatctgcaactgtatatttggagtgctttgaagacttcattggagacgggaataacatcacataagaactagatggaaacattctcagaaacttcttcttgatgtgtgcattcaacctacagagttgaagcctccttttgatagagcagttttgaaacactctttttgtagattctgcaagtggatatttggggtgctttgaagagtttgtcggaaacgtgaatatcttcacataaaaactagtcagaagcattctcaaaaattactttgtgatgtgtgcattcaactcacagagtttaacctatttttgatagagcagttttgaaacactccttttgtggaatcagcaagtggacatttgtagcactttgagggctttggtggaaaaggaaatatcttcacataaaaactagacagaagcaatctcagaaacttctgtgatgtttgcattcaactcacagattggaacatttcttttgatagagcagttttgaaacgctctttttgtagaatctgcaagtggacattaggaacactttgagtgctagagtggaaaaggagatatcttcacataaaaactagacagaagcattctcagaaacttctttgtgatgtttgaattcaactcagagtgttgaacatttcctttgatagagcagttttgaaacactctttttgtagaatctgcaagtggataattggagtactttgaagcgttgttggaaacggtaatatcttcacataaaaactagacagaagcattctcagaaactactttgtgatgtgtgcattcaactcacagagttaaaccttccttttgatagagcagttttgaaacactctttttatagtatctgcaagtggatatatggagtgctttgaagccttcattggaaatgggaatatattcacataaaaaatatacataagcattctcagaaacttccttgtgatgtgtgccttcaactcacagagctgaaccttccttttgataaagcagttttgaaacactctttttgtggaatctgcaagtggataattggagtaattttaagcattgttggaaacgggaatatcttcacataaatactagacagaagcattcttagaaacttctttgggatgtgcgcattcaactcacagagttgaaccctacttttgatggagcagttttgaaacgctctttttgtagaatctgcaagtggatatttggagtgctttgaggcctatggtagaaaaggaaatatgttcatataaaaactagacagaagcattctcagaaattactttttgatgtgtgcattcaacttacagagttgaacctttcttttcataggacagttttgaaacactatttttttagtgttggcaagtggatatttggactgctttgaggcctttgttggaaacaggaatatcttcacataaaaactagacagaggcattctcagaaacttctttgtgatgtgtgcattcaactcacagaattgaaccttccttttgatagagcagttttttcttcttttctttatttattatgattatactttatgttttaggttacatgtgagcaatgtgcaggttagtaacgtatgtatacatgtgccatgctggtgcgctgcacccactaactagtcatctagcattaggtatatctcccaatgctatccctccccctttcccgcaccccacaactgtccacacaatgtgatgttccccttcctgtgtccatgtgatctcattgttcaattcccacctctgagtgagaatatgcggtgtttggttttttgttcttatgatagtttactgagaatgatgatttccaatttcatccatgtccctacaaaggaaatgaactcatcattttttatggctgcatagtattccatggtgtatatgtgccacattttcttaatccagtctatcattgttggacatttgggttggttccaagtctttgctattgtgaatagtgctgcaataaacatacatgtgcatatgtctttatagcagcatgatttatagtcctttgggtatatacccagtaatggtatggctgtgtcaaatggtatttctaggtctagatccctaaggaatggccacactgacttccacaattgccgaactagtttacagtcccaccaacagtgtaaaagtgttcctatttctccacatcctctccagcacctgttgtttcctgactttttattgattgccattctaactggcatgaaatggtatctcattgtggttttgatttgcatttctctgatggccagtgatggtgagcatttgttcatgtgttttttggctgcataaatgtcttcttttgagaagtgtctgttcatgtcctttgcccactttttgatggggttgtttgtttttttcttgtaaatttgttagtgttcattgtagattctggatattagtcctttgtcagataagtaggttgtgaaaattttctcccactttgtaggttgcctgttcactctgatgctagtttgttttgctgtgcagaagctctttagtttaattagatcccatttgtcaattttgtcttttgttgtcattgcttttggtgttttagacatgaaatccttgcccatgcctatgtcctgaatggtaatgcctaggttttcttccagggtttttatggttttaggtctaacatttaagtctgtaatccatcttaaattaatttttgtataaggtgtaaggaaggaatccagtttcaggtttctacatatggctagccagttttctcagcaccatttattaaatagggaatcctttccccattgcttgtttttctgaggtttgtcaaaggtcagatagttgtagacatgcggcgttatttctgagggctctcttctgttccattgatctatatctctgttttgatatcagtaccattctgttttggttactgtagccttgtagtatagtttgaagtcaggtagtgtgatgcctccagctttgttcttttggcttaggattgacttggtgatgcgggctcttttttggttccatatgaactttaaagtcgttttttccagttctgtgaagaaagtcattggtagcttgagggggatggcattgaatctgtaaattaccttgggcaatatggctattttcacgatattgattcttcctacccatgagcatggaatgttcttccatttgtttgtatcctcttttatttctttgtgcagtggtttgtagttctccttgaagaggtccttcacatcttttgtaagttggattcctaggtattttattctctttgaatcaattatgaatgggagttcactcatgatttggctctctgtttgtatgttggtgtataagaatgctgtgatttttgtacattgattatgtatcgtgagcctttgctgaagttgcttatcagattaaggagactttgggctgatacaatggggttttctagatatacaatcatgtcgtctgcaaacagggataatttgacttcctcttttcctaattgaatacccgttatttccttcttctgcctaattcccctggccagaacttccaacactatgttgaataggagtggtgagagagggcatccctgtcttgtgccagttttcaaagggaatgcttccagtttttgcccattcagtatgatattggctgtgggtttgtcatagatagctcttattattttgagatatgtcccatcaatacctaatttattgagagtttttaacatgaagggttgttgaattttgtcaaaggctttttgtgcatctatagagataatcatgtggtttttgtctttgttctgcttatatgctggattacatttattgatttgcgtatattgaaccagccttgcaccccagggatgaagcccacttgatcatggtggataagctttttgatgtgctgctggatttggtttgccagtattttattgaggatttttgcatcaatgttcatcaaggatattggtctaaaattctcttttttggttatgtctctgcctggctttggtatcagaatgatgcttgcctcataaaatgagttagggaggattccctcttttctattgattggaatagtttcagaaggaatggtaccagttcctccttgtacctcttgtagaattcggctgtgaatccatctggtcctggtttctttttggttggtaaactattgattattgtgacaatttcagttcctgttattggtctattcagagattcaacttcttcctggtttagtcttgggagagtctatgtgtcgaggaatttatccatttcttctagattttctagtttatttgcatagaggtgtttgtagtattctctgatggtagtttgtatttctgtgggatcggtggtgatatcccctttatcattttttattgcatctatttgattcttctctctttttttctttgttagtcttgctagcggtctatgaattttgttgatcctttcaaaaaaccagttcctgtattccttaattttttgaaggttttatgtgtctctgcttccttcagttctgctctgattttagttatttcttgccttctgctagtttttgaatgtgtttgctcttgcttttctagttcttttaattgtgatgttagggtgtcaattttggatctttcctgctttctcttgtgggcatttagtgctatatatttccctctacacactgctttgaatgcaacccagagattctggcatgttgtgtctttgttatcattgatttccaagaatatctttatttctggcttcatttcattatgtacccagtagtcattcaggagcaggttgttcagtttccatgtagttgagcggttttgagtgagattcttaatcctgagtttgattgcactgttgtttgagagacagtttgttataatttctgttcttttacacttgctgaggagagctttacttccaagtatgtggtcaattttggaataggtgtggtgtggtgttgaaaaaaatgtatattctcttgatttggggtggagagttctgtatatgactattaggtccgcttgatgcagagctgagttcaattccttggtatccttgctgactttctgtctcattgatctgtctaatgttgacagtggggtgttaaagtctcccattattaatgtgtgggagtctaagtttctttgtaggtcactcatgacttgctttatgaatctgggtgctcctgtattgggtgcatatatatttaggatagttagatcttctttttgaatcgatccctttatcattgagtaatggccttctttgtctcttttgatctttgttggtttaaagtctgttttatcagagactaggattgcaacccctgccttctttgttttccatttgcttggtagctcttcctccgtccttttcattttgagcctatgtgtgtctatgcccgtgagatgggtttcctgaatacagcacaatgatgggtcttgactctttatccaatttgccagtctgtgtcttttaattggaacgttttgcccattcacatttaaagttaatattgttatgtgtgaatttgatcctgtcatgatgttagctgtttattttgctcgttaattgatgtagttttttcctagtctcgatggtctttacatttttgcatgattttgcagcagctggtactggttgttcctttctatgtttaacgcttccttcaggagctcttttagggctggcctggtggtgacaaaaatctctcagcagttgcttgtctaaaggattttatttctccttcacttatgaagcttagtttggctgtatgtgaaattctgggttgaaaattcttttctttaagaatgttgaatattggcccccactctcttctggcttgtacagtttctgccaagagatctgctattagtctgatgggcttccctttgagggtaacccaacctttctctctggctgcccttaacattttttccttcatttcaactttgctgaatctgacaattatgtgtcttggagttgttcttctcgaggagtatatttgtggcgttctctgtatttcctgaatctgaatgttggcctgccttgctagattggggaagttctcctggataatatcctgcagagtgttttccaacttggttcctttctccccatcactttcaggtataccaatcagatgtagatttggtcttttcacatagtcccatatttcttggaggctttgtttttttctatttattcttttttctctaaacttcccttctcacttcatttcatttatttcatcttctatcactgattccctttgttccagttgattgcatcggctcctgaggcttctgcattcttcacgtagttcttgagacttggttttcagttcctttaagcagttctctgtatttgttatcctagttacacattcttctaaatttttttcaaagttttcaacttctttgcctttggtctgaatgtcctcccatagctcggagtaatttgatcatctgaagccttcttctctcagctcgtcaaagtccttctatgtccagctttgttccattgctggtgaggaactgcattcctttggaggaggagaagccctctgctttttagagtttccagtttttctgctctgttttttttcccatctttgtggttttatctacttttggtctttgatgatggtgatgtacagatgggcttttggtgtggatgtcctttctgtttgttagttttcctcctaacagacaggatcctcagctgcatgtctgttggagtacccagccttgtgaggtgtcagtatgcccctgctggtggggacctctcagttaggctgctctcgggtcaggggtcaaggacccacttgaagaggcagtctgcctgttctcagacctccagctgcatgctgggagaaccactgctctcttcaaagctgtcagacagggacatttaagtctgcagaggttactgctgtctttttgtttgtctgtgtcttgcccccagacgtggagcctacagaggcaggcaggcctccttgagctgtggtgggcttcacccagtttgagcttcctggctgctttgtttacctcagcaagcctgggcaatggcgggtgcccctcccacagcgtccttgcccccttgcagtttgatctcagactgctgtgttagcaatcagggagactccctgggcgtaggaccctcggaggcatgtgtgggatataatctcctggtgcaccattttttaagcccattggaaaagtgcagcattcgggtgggagtgacccaattttccaggtaccctctttcaccattttctttgactaggaaagggaactccctgaccccttgcacttcccaagggaggcaatgccttgccctgctttggctcatgcacggtgcacgcacccatgagagagcagttttgaaacaccctttttgtagaatctgcaagtggatatttggagagctttgagtcctatcatgcaaagggaaataacttcacataaaaaatagacagaagcattctccaaaacacctttgtgatgcttacattcaactcacagaggtgaacctttcttttgatagagcagttttgaaacactcttttttttagaatctgccattggttatttggagcgctttgaggcctttggtggaaatgggaatatcttcagataaaaaccagacagaagcatgctcagacactactatgtgatgtttgcattcagctcacagagttgaacctttttgatagagcagttttgaaacactctttttgtagtttctgcaagtggatatttggactcctttgaggacttcgttggaaatgggaacatcttcacataaaactagacagaagtattctcacaaacttctttgtgacgtgtgcattcaactcacagagttttaccttccttttgatataacagttttgaaacactctttttgtagaatctgaaagcggatgtttggagtgctttgaggccttcagtgggaatgggaatatcttcacataaaaaacagcagaagcattataaaaaacgtctttgtgatgtgttcattgaatgcagagagttgaacgttgcttttggtagagtagttttgaaacactctttttgtaaaatctgcaggtggatatttggagcactttgaggcctatggtggaaaaggaattatcttcacacaaaaactagacagaagcattctgagaatcttctttgtgatgcttgcattgaactcacagtgttgtaccttccttttgatagagcagttttgaaacactctttttgtagaatctgcaagtggacatttggagagttttgaggcctgtggttgaaaaggaagtatcttcatataaaaactagagagaagcattatcagaaacttctttgtgatgtatgcattcaactcacagagttgaaccttccttttgatagaacagttttgaaacactgtttttgtagtatctgcaagtgaatatttgaaatgctttgaggcctactgcggaaaaggaaatatcttcacataaaaactagacagaagcattctcagaaacttctttgtgatgtgtggattcaactcacagagttgaacctttcttttgatagagcagttttgaaacagtctttttgtagaatctgcaagtggatatttgaagcaccttgaggcctatggtaaaatagcaaatatctttacgtaaaactaaacacaagcattctcagaaatgctttgtgatgcttgcattcaactaacagttttgaaccttccttttgatagagcaattttgaaaatctttttgtagaatctgtaagtggatattcagagcgctttgaggcctatggtggaaatgggaatatcttcacataaaaagttgacagaaacattctcagaaactactttgtgatgcgtgcattaaactcagagagttgaacgttactttcaatagagcagtttggaaacactctttttgtagaatctgcaagtggatatttggagcgctttgaggcctatggtagaaaaggaaatagcttcatataaaaactagacagaagcgttctcagaaacttctttgtgatatatgcactcaactcatagagttgaaccttccttttgatagagcagctttgaaacactctttttgtagaatctgccagtggatatttggactgctttgaggccttcggtggaaacgggaatatcttcacttaaaaactagacagaaggattctgagaaacttctttgtgatgtgcacattcaacccactgagttgaaactttctattgtttgagcagtttggaaacagagttttgtaatatctgcaaatggataattggagatctttgacacctacggtggaaaatgaaatatcttcacataaaaactagacagaagatttcttggaaacttctttgtaatgtgtgcattcatctcacagagttgaacatttctttttttgagcagttttgaaacactctttttgtagaatctgcaagtggatatttggagccctttgtttcctatagtggaaaaggaaatatcttcacttaaaagtagacagaagcattctcagaattttctttgtgatgtgtacattcatctcacagagttgaacctttcttttgattgagcagttttgaaacactctttttgtagaatcagcaagtggatatttcgaatgctttgcgacctatagtggagaaaggaataccttcacataaaaactagacagaagcattctgagaaactattttgttatgtgtgcattcatctcagagtgctgaactgtttttttatttgagcggttttgcaacactctttttatagaatctgcaagtggatatttggagaattttgccacctatagtgggaaaggaaatatcttcacataaaaacaagacaaaagcattctgagaaactcctttgcaatgtgtgcattcatctcagagaatagaacttttcttttgattgagcagttttgaaacactctttttgtagaatctgcaagggtgtatttggggcgttttgaggcctgtggcggaaaaggaaatttctttacataaaaactctgcagaagcattctgagtcacttctttgtgatgcgtgcattcatctgatgtagttgaacctttcttttgattgagtagtttggaaacactctatttgcaggatgtgcaagtagatatttggagcaccttgatgcccatggtggaaaacaaaatatcttcacataaaaactacacagaaacattctgagaaacttatttgctatgagtgcattcatctcacagagttgaaacttttttttgattgaacagttttgaaacactctttttgtagaatgtgaaagttgatattttgagcgctttgaggcctgtagtggaaaaggaaatatcttcacataaaaactacacagaagatttctgagaaaattctttgtgatttgtgcattcaactcacatatttgaacctttcttttgataaagcagttggtaaacagtctttttgtagtatctgtaaatggaaatttggagcactttgaggcctatagtggagaaggtaatatctacatataaaaactagacagaatcattatgagaaacttctttgtgaagtgtgcattcatctcacagagttgaaccttacttttcattgagcagttttgaaacactctatttgtaggatctgcatgtggatatttggcgcattttcagtctatagtggacaaggaaatatcttcacataaaaactagacagtagcattctgagaaacttctttgtgatgtgtgcattgatctcacattgtgaaagtttctttcgattgagtactttggaaacagtctttttgtagtatctgcaaatggatatttggggcgcttaaaggcctatagtggaaaaggaaatatcttcacaaaatagatagacagaagcattctgagaaacttcattgtgctgtgtgcattcatctcagagatttaaacttttgttttgattgtgcagttttgaaatactctttttgtagaatctgcaagtggatatttgtagccatttgcggcctatagtggaaaagcaaatatcatcacataaaaacaagacagaagcattctgagaaacttctttgtgatgcatgcatgcatctcacagagttgaagctttcttctgattgagcagttttgaaacagtctttttgtaaagtctgcatgtggatatatggagagctttgggcctatagtggaaaaggaaatattttctcattaaaactggacaaaagcattctgagaaatttttttgtgatctgtgcattcaactcacagatttgaacttatcctttgattgatcagtttggaaacattctttttgtaatatcagccagtggatatctcaagcgattgagacttatagtggaaaaggaaatatcttcaggaaaaactagacagaagaattctgataaacttctttgtgatgtgtgccttcatctcacagtgttgaacctttcttttaattcagcagctttgaaaaagtctttttgtagaatctgcatgtggatatttggagtgctttgctgcctatagtgaaaaaggaaatatcttcacataaaatctagacagaagaagtctgagaaacttccttgtgatgtgttcattctccacacagatttgaaattttcctttgattgagcaattttgaaacactcttttttttgtgcaagtggatatttggagcacttttaggcatatcatggaaatggaaatgtcttcatataaaaactagacataaaaattccgagaaacttgtttgtgatgtgtgccttcaactcacagtgttgaaactttcttttgattgaagagtttggaaacactcttttgtagtatcggcaagtggatatttggatcgtttcacggtctaaagagggaaagaaaatattttcacataaaaactagacaaaagcactctcagaaacatctttgtgatgtgttcattcatctcacagggttgaaccaatcttttgattcagtagttttgaaacactctctttgcagtatctgcaagggaatatttggagcgctatgaggcctatggtggaaagcaaatatctttacataaaactagacagaaacattctgagaaacttctttgtgaagtgtgcagtgatctcacagatttgaacctttgttttgatttagctattttgaaacactctttttgtagagtctgcaagtggatatttggagcactttgtggcctacggtagaaaattaaatatcttcacacaaaaactagcaagaagcattctgagaaacttctttttggtgtgtgcatgcaactcaaagagttgaacctttcttttgattgagcagtttgtaagcattctttttgtagcatctgcaaatgtatatttagagtgccttaaggcctacagtggaaaaggaaatatcttcacataaaaactagatggaagcattctgagaaactactttgtgatgtgtgcattcatttcaaagagtttaacctttcttttgattgagcagttttgaaacactctttttgtagaatctgcaaggggatatttgcagcgatttttggcgtatattggaaaaggaaatatcttcacataaaacctagagagaagcattctgagaaacatcttcctgaagtgtgcattcaacttacagagatgaacctttcttttgattgagcagtttggaaacactctttttgtagtatctgcaaattgatattttgagtgctttgaggcttatggtggaaaaggacatatcttcacataaaaaccagacagaagaattctcagaaacgtctttgtgatatgtgcattcatctcacagagttgaaactttcttttcgttgagcagttttgaaacccttattttgtagaatctgcaagtgtatattaggagagcttttctgtctatggtggaaaaggaaatatcttcacataaaagctagactgaaacattctgagaaacttctctgtgatgtgttcattcatctcagatagattaatctttctttttattgagcatttttgaaccactcttttttaagtatctgcaagtggatatttggagcacattgtggcctatagtggaaaaggaaatatcttcacattaaaactagactgaagctttctgagaaacttctttgtgatgtatccattcatctcacgagatgaacatatcttttgattgagcagtttggaaacactctttttgtagaatctgcagttggatatttggagctcttgaggcctatgttggaaaaggaaatatcttcacataaaaaccagacagaagcattctgataaattgctttgtgatgtttgccttcaactcacagagttggatctttcttttgattgagcagttaagaattattctgtatgtagtatctgcaattggatatttggagagctttggggcctatagtggaaaaggaaatatcttcacagaaaaactagacagtagcattctgagaaaattctttttgatgtgttcattcatctcacgagatgaacatttttttttgactgagcagttttgaaacactgtttttctagaatctgcaattggatatttggtgcgctttgaggcatatggtgaaaaaggaaatatcttcacattaaaaatagacagaagcactctgagaaacttttttgtgatgtgtgcattcatctcgcagtgttaaaactttcctttgattcagcaattttgaaacactcttcttgtagaatctgtgagtggatatttggaacccattcaggcatatagtggaaaacgatatctcttcacatagaaactagacaaaaacattctgagaaattaccttgtgatgtgcactttcaactcacagagttgaacttttcttttgattggggagtttggagacagtctttttatagtatctgcaaatggatatttggagagcttacagtcctacggtggaaaaggaaatatctttacatgaaagctagacagaagaactctgagaaacttccttgtgatgtgtgcattcatctcacagagttaaacctttcttttcattgagcatttttaaaacactcttttttacaaatctgcaattggagatttgagtgctttgcggcctatagtgtaaaagaaaataccttcaaataaaaactagacagaagcattctgggaaacttctttgtgatatgtgcattcatctcacagagttgaaactttcttttgattgtgcagttttgaaacactctttttacagaatctgcaattggatatttggagtgctatgaggcctattgtggaaaaggaaatatcttcacataaaaactagacagaagcattctgagaaagttctttgtcatgtgtgtattcacctcacagtgttgcaaatttcttttgattgagcagtttggaaacagtctttatgtactatctgcaaatggatattttgagcgctttgtggcctatagaggaaaaggagttatcttcatataagaactagacagaagcattctgagaatcttctttgtgatgtgttcattcgtctcacagtgttgaagctttcttttgattgacagttctgaaacactttttttttagaatctgcaagtggatatttggagcgctttgtggcttatattggaaaaggaaatatcttcaaataaaaactagacagaggtattctgagaaacttctttgtgatgtgtgcactcatctcacagagttgaacctttattttgattgagcagttttgaaacactctttttgtagaatctgcaagtggatatttggagcgcttggctgcctatggtgaaaaagaaaatatcttcacgtaaaaacaagacagaatcattctgagaaactcctttgtgatgtgtgcattcatctcacacagttgaacatctcttttcattgggaagttttgaaacactctttttgtagaatctgcaagtggatattttgagcgatttgaggcctatggtggaaaaggaaatatcttcacctaaaaactgtacagaagcattctgagaaacttctttgtgatgtgtgcattcaactcacagagtggaacctttcttttgcttgagcagtttggaaacattctttatgtagaatctgcaaatggatatttggagagctttgaggcctatggtataaaaggaaatatcctcacataaaaactagcaataagcgttctgagaaactcctttgtgatgtgcacatacaactcaaggagtggaaccttactttggattgagcaatttgtaagcattcttttgtatttatttttaatttactttacgttttagggtacttgtgcacaatgtgcatgttagttacatatgtatacatgtgccatgctggtgtgctgcacccattaattcatcatttagcattaggcatatctcctagtgctatctccccacttcccccaccccataacagtccccagagtgtgatgttcccctttctgtgtccatgtgttctcattgttcaattcctacctatgactgagaacatgcattgtttggtttttttgtccttgagatcgtttactgagaatgatgatttctgaattaatccgtgtccctacaaaggacatgaactcatcattttttatggctgcatagtataccaaggggtatatgtgccacattttcttaatccagtatataattgttggtcatttgggttggttccatgtctttgctattgtgaatagtgctgcaataaacttacatgtacatgtgtctttatagcagcatgatttatactcctttaggtatatacccagtaatgggatggctgggtcaaatggtacttctagttctagatccttaaggaatcgccacactgacttccacaagggttgagctagtttacagtcccaccaacagtgtaaaagtgttcctatttctccacatcctctccatcacctgttgtttcctgactttttaatgattgctattctaactggtgtgagatggtatctcattgtggttttgatttacgtttccctgatggccagtgatggtgagcatttgttcatgtgttttttggctgcataaatgtcttcttttgagaagtgtctgttcatgtcctttgcccactttttgatggggttgtttgatttttttcctgtaaatttgtttgagctcattgtagattctggatattatccctttgtccgatgagtaggtagtgaaaattttctcccattttgtaggttgcctgttcactctgatggtagtctcttttgctgtgcagaagctctttaatttaatttgatcccatttgtcaattttgtcttttgttgccattgcttttggtgttttagacatgaagtccttgcccatgcctatgtcctgaatggtaatgcctaggttttcttctagggtttttatggttttgggtctaacatttaagtctttaatccatcttaaattaatttttgtataaggtataaggaaggaatccagtttcaggtttctacatatggctagccagttttctcagcaccatttattaaatagggaatcctttccccattgcttgtttttctgaggtttgtcaaagatcagatagttgtagatacacagcattatttctgagggctctcttctgttccattgatctatatctctggtttgttaccagtaccatgcagttttggttactgtagccttgtagtatagtttcaagtcaggtagcatgatgcttccaggtttattcttttggattaggattgacttggtaatgtgggctccttattggttccatatgaattttaaagtagtttttttccaattctgtgaagaaagtcattggtagcttgatgggaatggcattgaatctataaattaccttggtcagtatggccattttcacattattgattcttcctatccatgagcatggaattttcttccatttctttgtatcctcttttatttccttgtgcaatggtttgcagttctccttgaagaggtccttcacgtcccttgtaagttggattcctaggtattttattctctttgaagcaattatgaatgagagttcactcatgatttggatctctgtttgtctgttattggtgtataagaattcttgtgatttttgtacgttgattttgtatccacaacataccagaatctctgggacacattcaaagcagtgtgtagagggaaatttatagcactaaatgcccacaagagaaagcaggaaagatccaaaattgacaccctaacatcacaattaaaagagctagaaaaacaagagcaaacacattcaaaagctagcagaaggcaagaaataactaaaatcagagcagaactgaaggaaatagagatacaaaaaaccctacaaaaaattaatgaatccaggagctggttttttgaaaggatcaacaaaattgatacaccactagtaagactaataaagaagaaaagagagaagaatcaaatagatgcaataaaaaatgataaaggggatatcaacaccaatccaacagaaatacaaactaccatcagagaatactacaaacacctctacacaaataaactagaaagtctagaagaaatggataaattcctcgacacatacaccctcccaagactaaactatgaagaagttgaatcaatgaataggtcaataagaggccctgaaattgtggcaataatcaaaagcttatgaaccaaaaagagtccaggaccagatggattcacagccgaattctaccagaggtacaaggaggaactgatacctttctttatgaaactattccaatcaatataaaaagagggaatcctccctaactcattttatgaggccagcatcttcctgataccaaagcctggcagagacacaaccaaaaaagagaattttacaccaatatcctttagaacattgatgcaaaaatcctcaataaaatactggcaaaccaaatccagcagcacatcaaaaagcttatccaccatgatcaagtgggcttcatccctggggtgcaaggctggttcaatatatgcaaagtaataaatgtaatcccgcgtataaacagaaccaaagacaaaaaccacatgattatctcaatagatgcagaaaaggcctttgacaaaattcaacaacccttcatcctaaaaactctcaataaattaggtattgatgggacgtatctcaaaataataagagctatctatgacaaacccacagccaatatcatactgaatggacaaaaactggaagcatttgctttgaaaactggcacaagacagggatgccctctctcaccactcctattcaacatagtgttggaagttctggactgagcaatttggcaggagaaggaaataaagagtattcaattaggtaaataggaagtcaaattgtccctgtttgcagatgacatgattgtatatctagaaaaccccattgtctcagccccaaatctccttaagctcataagcaacttctgcaaagtcactgtaagcattctttttggagcatctgcaaatgtatatttggagcgccttgatacctttagtgaaaaaggaaatatcttcacataaaactagacagaagcattatgagaaacttcttagtgatgtctgcattcatctcaaagaagtgaagctttcttttgattaagtagttttgaaatcctctttttgtagaatctgcaagtggatataaggagagctttgtggtctatagtggaaaaggatatatcttcacgtaaaaacgagacagaaacattctcagaaacttttttgtgatgtgtgcattcatctcacagagctgaaactttcttttgatagagaagtttgaaacactattttttaaggttctgcaagtggatatttggagcactttgtggcctagagtggaaaaggaaatatcttcatattaaaaatagagagaagcattctgagaaacttcttcatgatgtgagctttcaactaacagagttgaacctttctttagattgaccagtttggaaaccctctttttgtagtatctgcaaatggatatttggagcgctttcagtcctatgttggaaaaggaaatatcttcacataaatacaagacagaagcattctcagaaagtactttgtgattgagcattcaactcacagagttgaaacgttcttttgattgaacagtttggaaacaggcttttgtagtacctgcaaatggatatttggagcgcgttgaggcctatagtggaaaaggaattatcgtaccataaaaactatacagaagcgttctgaaaaacttcttttctgtgtgtgcattcatctcacagagttcaacttttgttttgattgaacagcttggaaacactccttttgtagaatctgcaagtggatatttggagcccttcgaggcctattgtggaaaaggaaatatcttcacataaaaaccacacagaagcattctgataaacttctttgtgatgtgagcattcatctcatgtagttgaaacttgtttttgattgagcagatttgaaacactctttttgtagaatctgcaattggatatttggaatgctttgcagcctttagtggaaaagcaaatattttcacataaaaccaaaaaagaaacattctgggaaacttctttgtgatatgtgcattcatcccacagagttgaacttttcatttgattgagcacttctgcaacactcttgttgtaggatctgcaaattgatatttggagcgctttgaggcctatggtggaaaaggaaatatcttcccataaaaactagacagaagcattctcagaaatttatttgtgatgtgtgcattcatctcacagagttgattatttctttcgattgagcagcttggaaacggctttttgaagaatcagaaaatgaatatttggagcgctttgaggcctgtggtggaaaatgaaatatctccacataaaaactagacagaagcattctgataaacttctttctgacgtgtgcattcatctcacagagttgaaactttattttgattgagcagttttgaaacactctttttgtaatatctataagaggatattttgagtgctttgaggcctatggtgaaaaaggaaatatcttcacataaaaccacagagcagcattctgggaaactcctttgtgatgtgtgcattcaactcactgagttgaacctttcttttgatagagcagtttggaaacagtctttttgcagtatctgaacatagataattggagcgctctgaggcctttggtggaaaagtaaatatcttcacataaaaactaggtgctacattctgagaatcttcttagtgatgtgtgcatacaactcacagagttgaatctttctactgattgagcatttttgaaacactccttttgtggaatctgcaagtgcatattcacagcagtttgcattaagtagtgtaaacggaaatatcttcaaataaaaactagacagaaggattctgagatacttttttgtgatgagtgcattcatctcacagatttgtacatttcttttgattcagcagtttttaaacactctttttctagtatctgcaataggatattaggagtgctttgaggcctttgttggaaaaagaaatattttctcataaaaactacagagaagcattctgagaaacttctttctgatgtgtgcattagactcacagagttgaaactttcttttcattgagcagttttaaacccactttttgttgaatctgcaagtggatatttggagcactttgaggcctatggtggaaaaggaaatatcttcccataaaaactagacagaaacattctgagaaacttctttgtgatgtgtgcattcatctcacagagttgaacctttattttgatttagccgttttggaacattctttatgtaggttctgtaagtggatatttagagcgctttgcggcctatagtggaaaaggaaatatcttcacataaaagctagacagaagcattttgagaaacttctttatgatgtgtgcattcttctcacagagttcaacctttctttggattgagcagttttgaatccctttttgtaggatctgcatgtggatatttggaatggtttgaggcgttttgtggaaaaggcaatatcttcacatataaagttgacaggggcattctgagaaacttctttgtgatgtttgcattccactcacacagttgaaactttcttttaattgagcagtttgaaacactctttttgaagtatctgtaagtacatatttggatcactgtgcggcctatgtttgaaaagttaatatcttcacataaaaactacacaaaagcattctgagaacgtcttcatcatttgtgcattcactcacagatttgaaattttcttttgattgggcagtttggaaacagtctttttgtagtatctgtaaatggatattttgagtggtttcaggcctatagtggaaaagaaaatatcttcacataaaaactagacagaagcattctgagaaagttctttgtgatgtcttcattcctctcagatagttgaaactttcttttcattgagcagttttgaaacactcattttctagaatctgcaagtggatatttgaatcactttcagtcctactgtgtaaaaggaaatatcttcacataagaactacagaaaagcagtctcagaaacttctttgtgatgtgtgcattcctctcacagagttgaacttttcttttgattgagcagtttggaaacacacactttttagaatctgcaagtggatatttggagcactttgaggcctatgtggaaaaggaaatatcctcaaataaaaactacacagaagaattcttagaaatttctatgtaatgtgtgcattcacctcatacagttgaacgtttcttttcattcagcagcttggaaacactttctttgtagaatctgcacatggatatttggagtgctttgtggcctattgtggaaaaggaagtgtcttcacataaaacctacacagaagcattcagagaaacatttttatgatgtgtacattcatctcacagagttgaacttttcttttgattgagcagttttgaaagactcttttagtagaatctgcaagtgaatatttggtgcctcagaggccaattgtgtaaaaggaaatatcttcacataaaaactacacagaagcattctgagaaacctctttgtgatgtgtgcattcatctcacagagttgaaccttgcttttcattaagcagtttggaaacactatttttgtagagtctgcaagtggatatttgaagcgctttgagaactattgtggaataggatatatcttcaaatgaaaattacacacaataattctgagaaacttctttgtgatgtgtgcattcatctcaaagagttgaacctttcttttgaatgagcagtttggaaaaaatctttttgtacattctgcaaatggatatttggagcactttttggcctattatggaaaaggaaatatcttcatgtaaaaactacatagaagcattctgagaaacttctttgcgatgtgtgcattcatctcacagagttgaacctttcttttgattgattagtttggaaacactctttttgtagaatctgtaagtggatatttggattgctttgaaggttatggtggaaaaggaaatatcttcacataaaaactacacagaagcattccgagaatcttctttgtgatgcttgcattcaacacacagagttgaaactttcttttgattgagcagtttggaaacacactttttgtagaatctgcaagtggatatttggagccctttgatgcccatttcagaataggaaataccttcacattaaaactacacagaagcattctgagaaacttctttgtgatgtgtgcatttatctcacatagttgaacctatcttttgattgagcagttttgaaactctctttttgtagaatctgcaagtggatatatggagcccttttaggcctatggtggaaaaggaaatatcttcacataaaaactacacagaagcattctgagaaacttcattgtgatgtgtgcattcatatcacagagttgaacctttcctttgattgggcagttttttattttattattattgtgctttaagttttagggtaaatgtgcacagtgtgcaggttatttacatatgtatacatgtaactaacatatgtatacatatatacaacgctggtgtgttgctcccattaactcgtcatttagaattaggtatatctccaacagctatccctcccccctccctccaccccagaactgtccccagagtgtgatgttccctttcctgtgtccatgtcttttcattgttcaattccccccactgagtgagaacatgcgatgtttgggtttttgtccttctgatagtttactgagtatgatgatttcctatttcatccatgtccctagaaaggacatgaactcatcattttttatggctgcgtagtattccacggtatagatgtgccacattttcttaatccagtctatcactgttggacttttgggttggctacaagtctttgtgttttgaaacactctttttgaagaatctgcaagtggatatttggagagttttgaggcctattgtggaaaaggaaatatcttcatattaaaactacacagaagcattctgagaaacttctttgtgatgtgggcattcatccaatacagttgaacttttcttttgattgagcagttttgaaaaactttttttgtagaatctacaagtggatatttggagagctttgaggcctattgtggaaaaggaattatcttcacttaaaaactacacagaagcattctgagaaacttctttgcaatgttcacattcatctcacagagttgaactttcgatttgactgagcatttttgaaacactctttttgtagaaactgcaagtggatatttggaccgctttgaggcctattgaggaaaatgaaatatcttcacataaaaactacacagaagcattctgagaaacttatttgtgatgtgtgcattcaactcacagagttaaatttatcttttcattgagcagctttgaaactttctatttgtagcatctgcaagtggataattggagtgctttgaggcctattgtggaaaagaaaatatgttcatattaaagctacacagaagcattctgagaatcttctttgcgatgtgtgcattcatctcccagagttgaacttttcttttgattgagcagttttgaaacactctatttgtagaatctgcaagtggatatttggagtgctttgaggcctattatggaaaagtaaatatcttcacataaaaactacacagatgcattctgggaaatttctttgcgatttgtgcacccatctcacagacttgaaatttcttttgattgagcagtttggaaacactctttttgtagaatctgcaagtggatatttggagtgctttgaggcctattatggaaaagtaaatatcttcacataaaaactacacagatgcattctgggaaatttctttgtgatttgtgcacccatctcacagacttgaaatttcttttgattgagcagtttggaaacactctttttgtagaatctgcaattggatatttggagtgcttggaggcatttagtggaaaaagaaaaaacttcacataaaaactagatggaagcgttctcagaaactactttatgatgtgtgtgttcaactcacagagttgaacatttcttttgatggagcagcttggaaacactcttcttgtagtatctacaaaggatatttggagcacttggaggcctgcagctgaaaaggaaataatttcacataaacactagacagaagcattctgagaaacttctttgtgatgtgtgcatttatctcacagagttgaactgttcttttgcttgatcagttttgaaacactcttcctgtagtatctgcaagtggatattgggagcactttgtggcctattgtggaaaagaaaatatcttcacataaaaactacacagaagcactctgagaaacttcttgaacctatctattgattgagcagttttgaaattctctttttatagaatctgcatttggatgtttgaaggaccttgtggctattggtagaaaaggaaatatcttcacacaaaaactacacagaagcattcagagaaactattttgtgatgcgtgcattgatctcacagagtttaatctttcttttaattgagcggctttcaaaaactctttttgtagaatctgcaagtggatatttcgggcgctttcaggcctattgtggaaaaggaaatattttcacataaaaactacaccaaagcatccttagaaacttctttgggatgtttgcctttatgtcacagagttgaacctttcttttgattgagcagttttgaaacacactttttgtagaatcttcaaggagatagttggagcccttttcggccaatggtggaaaaggaaatatcttcatataaaaactacacagaagcattctgagaaactactttgaaacgagggcattcatctcaccgagttgaaaatttctttgggttgagcagttttgaacgactcattttgtagtatctgcaagggcatatttctagtattttttggcctattgtggaaaatgaaataccttcccataaaaacaacacagaagcattctgagaatttttttgtgatgtgtgcattcatctcacagagttgaaaatttctttgattgagcagttttaaaatactctttctatggaatctgcgagtggatatttggagcgctttaaagccttttgtgtaaaaggaaatatcttcacataaaaactacacagaagcattctgagaaacttctttgtgatgtgtgcattcatctcaccgagttgaacctttcttttcattgagcagtttggaaactctctttttgtagagtatgcaagtcgatttttggagcaatttgtggcgtatggtggaaaagaaaatatcttcacataatatatacatggaagcattctgagaaacttctttgtgatgtgtgcattcaactcaaagagttgaacctatgtttgagtagttttaaaactctctttttctagaatttgcaagtggatatttggagccatttgtggcctgtggtggaaaaggaaatatcttcacataaaaactacacagaagctttctgagaaacttccttgagatgtacgcattcatctcacagagttgaacatttcttttgattgagcagttttgaaacactctttttgtagaatctgcatgtcgatgtttggagtgccttgaggtctgttgtggaaaaggaagtatcttcatatcaaaactacacagaagcattctgagaaacttctttgtgatgcatgtattcttctcacaaggttgaacctctctcttgattgagcgattttgaaacactccttttgtagaatctgtaactggatatttggagtgctttgaggcctattaaggaaaaggaaatatcttcacataaaaactgcacagaaacattctgagaaacttctttgtgatgcgtgccttcatctcaaggagttgaacttttcttttgattgagcagtttggaaacacactttttgtataatctgcaagtgggtatttggaaaactttgaggcctattgtggaaaaggaaatatcttcacataaaaactacacagaagcattctgagtaacttctttgtgatgtgtgcattcaactcacagagttgaacctcccttttttggggggcagttgtgaaactctctttttgtagaatatgcaagtggatatttggagctctttgaggcctgttgtggaaaaggaaatatcttcacataaatactacgtggaagcattctgagaaacttctttgcaatgtgtgcattcatctcacagagttgaacggttattttgattgagcaatttggaaacacacattttgtggaatatgcaagtggatatttggagcgctttgaggtctgtggtgcaaaagggaatatcttcacataaaaactacagagaagcattcttagaaacttctttgtgatttgtgcattcatctcacagaggtgaacctttctttttattgagcagttttgaaactctctttttctaggatctgcaagtgcatatttggagtgctttgagctcttttttggaaaagggaatatcttcacataaaaactacacagaagcattctgagaaacttctttgtgatgtgttcattcatctcacagagttgaacctttattttgattgagcagtattgaaacaatctttttgtagaatctgaaagtgaatatttggaatgctttaaggcctaatgtggaaaaggaaatatcttcatataaaaagtgcacagaagcattctgagaaacttctctgtgacgcgtgcattcatctcaaagagttgaaactttctttttattgatcagtgttgaaacactgtttttgtagaatctgtaagtggatatttggagcgctttgaggcctaatgtggtaaagtaaatattttcacataaaagctacacagaagcattctgagaaacttctttgtgatgtgtgcattcatctcaaagagttgaagctttcttttgattgactagttttgaaacactctttttgtagaatctgcaagtggatatttggagcgcttttaggcctatcgtggtaaaggaaatatcttcacataaaaacaacacagaagcattctgagaaacttcttcatgatgtgtgcattcatcacatggaattaaacctttctgttgattgagcacatttgaaacacactttttgcagaatctgcaagtggatatttggaacgctttggcgcctcctgtggaaaaggaaatatcttcatataaaaagtacacagaagcattctgagaaactactttgtgatgcgtgccttcatctcacagagtggaacctttcttttgattgagcagttttgaaacactctttttgtagaatctgcaaatggataattagacctctttgaggccttttgtggaaaaatgaatatcttcacataaaaactacacagaagcattctgagaaacttctttatgatgtgtgcattcaattcacggagttgaacctatcttttgattgaggggttttgaaactctctttttgtagaatctgcaactggatatttagagccctttgaagccaatgatagaaaaggaaatatcttcatataaaaactacacagaggcattctgagaaacttcattgttatgtgtgcaatcatttcacagagtttaacgtttcctttgatagagcagttgtgaaacactctttttgtagcatctgcaagaggatatttggagcgctttgaggcctattgtggtaaaataattatcttcaaataaagctacacagaagtattctgagaaacttcttcgtgatttgtgcattcatctcacagagttgaacatttcttactattgagcagttttgaatcacactttttgcagaatctgcaagtgcatatttggagagctttggggcccatggtggaaaaggaaatatcttcatataaaaactacacagaagtattctgagaaacttctttgtgaagtgtgcattaatctcacagagttgaaccttacttttgattgagcagttgggaaacacactttttgtataatctgcaactggatatttggaacgctttgaggcctcttgcggaaaaggaaatatcttcatgtaaaaactacacagagcattctgagaaatttttttgcgaagtgtgcattcatttcacagagttgaaccttacatttgattgagcagtttggaaacactctttttttggaaactgcaagtggatatttgaagcgctttcacatccatggtgcaaaagggactatcttcacataaaaactacacagaatcattctgagaaacttctttgtgatgtgtgcattcaactcacagagttaaacttttcttttgattgagcagtttggaaacatcctttttgtagaatctgcatgtggatatttgggacgctatgaggcctactgtggaaaaggaaatatctttttgtaaaatctacagagaagcattctgagaaacttcttgtcatgcgtgcattcatctcacagatttgaagctttcttttgattgagcagtgtggaaaccctctttttgtagaatctgcaagtggatatttggagcgctttgaggtctattctggaaaaggaagtatcttcacataaaaactacacagaatcattctgagaaacttcttaaagatctgtgcattcatctcacagagttgaacatatcttttaattgtgcagttcaagaactctctttttgtagaatctgtaagtggatacttagagagctctgagtcttgtggtggaaaaggaaatatcttaacttaataatgacacaaaatcattttgagaaaattcttttgatgtgtgcattcaactcacagatttgagcctatcttttgattgagcacttctgaaactctctttttgtagaatctgaatgtggatatctggagccctatgcggtctgtggtagaaaaagaaacatcttcacataaaaactacacggacgaattctgaaaaacttctttgtgatgtgtgcattcatctcacagagttgaaccttccttttgattgaacagttttgaaacaatctttttgtagaatctgcaagtggatatttggaacgctttgaggccaattgtggaaaaggaaatatcttcatataaaaactgcacagaattattctgagaaactactttttgatgtgtgcattcaactcacatagttgaacctactttttgatttagcagttttgaaacactctttttgtagaatctgcaaatgtatatttagagtcatttgtggactatggtggaaaatgaaatatcttcacataaaaactacacagaagcattctgagaaacttctttgtgatgcttgcattcaacacacagagttgaaactttcttttgattgaggaattttgaaacactctttttgtagaatctgaaagtggatatttggagtgctttgtggcctaaggtggaaaaggaaatatcttcacataaaaactacaaagaatcattctgagaaacttctttgtgatgtgtgcattcatctcacagagttgaaacttccttttgattgagcagttttgaaactctgtttttgtggaatctgcaactggatatttggagccccttgcagcctatggtggagaaggaaatatcttcaaataaaaactacacagaagcattctgataaacttctttgtgatgtgtgcattcttctcacaggattgaacctctctcttgactgagcagttttgaaacactctatctggagaatctgcacgtggatattggaagcgctttgaggcatattgtggaaaatgtaatatcttcacataaaaactacacagaagcattgtgggaaacatctttgtgatgtgtgcattcatctcatagagtggaacctttcttttgattgagttgttttgaaacactctttttgtacagtctgcaagtggatatttggagggctctgaggcctgtcgtggaaaaggaaatgtcttcacagaaaaactgcacagaagcattctgagaaacttctacaccgtgagtgcattcatctcacagagttgaacttatcttttgatagagcagtttttatactctcttttggtagaatctgcaagtggataattggagcctttgtgggctacattggaaaaggaaatatcttccaatataaactacacagaaacattctgaaaaaattcttcgtgatgtgtgtattcatctcacagagttgaacctttctttgatttagaagttttgaaacactctttctttagaatctccaagtggatatttggagcgctttgcggcctattgtggaaaaggaaatatcttcccataaaaaatacacagaagcattctgaggaatatcattgtgatgtgggcattcatctcacagagttgagcgtttcgtttgattgagcaggtttgaaatactctttttgtagagtttgcaagtggatatttggagcactttgagggttacagtggaaaaggaaatatcttcaaataaaaactacacagaagcattctgaggaactaatttgtgatgtgcacattcaactcacagaatggaacctttctttggattgagcagctttggaacactctttttgtagaatctacaaaatggatatttggagcgctttaaggccttttgtcgaaaaggaaatatcttcacataaaacctgcacagaagtattctcagaaacttctttctgatgtgtgcattcatctcacagagttgaacctttcttttgattgagcagttttgaaacactctttttgtagaatctgcaagttttatttggagcactttgatgcctgtggtggaaaagggtatatcttcacataaaattacacagaagcgttctgagaaacttctttgtgatgtgtgcattcgactcacagagttgaacctatcttttgattgagcaggtttgaaactctctttttgtagaatctccaagtggatattttgagcctttgtggcctatggtggaaaaggaaatatcttccaataaaaactaaacagaagcattctgagaaacttgtttatgatgtgtgcattcacctcaccgacttgaatctttctttggattgagcagctttgaaaaactatttttgtagaatctgcaagtgaatatttgagcactttgattcctacggtggaaaatgaaacatcttcacatgaaaactagacagaagcattctgagaaacttctatgtgatgtgtgcattccactgacagagttgaaactatcttttgatagtgcagtattgaaactctccttttgtagaatctgcaagtggaaatttggtagacctttgcagccaatggtggaaaagagaatatcttcacagaaaaattacatagaagtattctgagaaacttctttgtgatgtgtgcaatcatctcacagagttgaacttttcttttgattgagcagttttgaaatattcgttttgtagaatctgcatgtgaatatttggagcgctttgaggcctatgttggaaaatgaaatatcttcataaaaaaattacatggagacattctaagaaacttctttgtgatgtgtgcattcaactgacagagctgaacttatcttttgatagagcagtttctaaactctttttatataatctgcaattggatatatggagcccttagaggcctgtggtggaaaagaaaatatcttcacataaaaactacacagaagaattctgagaaacttctttgtgatgttgcattcatgtcacagagttgaacctttcttttgattgagcagttagcaaacactctttttttagaatctgcaagtggctattttgagcgccttgaggcctattgtggaaaatgaaatatcttcacataaaaactacacagaagcattctgagaaacttctttgtgatgtgtgtattcacctcacagtgttgacactgtcttttgattaagcaagtttgaaatactcttttcgtagaatctgcaaatgaacgttttgagcgctttgaggcttatggtggaaaaggaaacatcttcacataaaaattacacaaaattcttctgagaaacttcattgtgatttgtgcattcaactcacagagttgaccttctcttgtgatagagcagttttcactctctttttctataatctgaaagtggatatttggagccctttgaggcctattgtggaatatgaaatatcttcatataaaaaccacacagaagcattctgagaaacatctttgtgatgtgtgcattcaactcagagagttgaacctttcttttgacagagcagttttgaaactctctttttgtagaatctgcaagtggttatttggagccatgtcctgccaatggtggaaaaggaaatatcttcccataaatactacacagaagcattctgagaaacttcattgtgatgcgtgcattcatcttaaagaattgaacctatcttttgatataacagttttgaaacactctttttgtagaatctgcaagtggataattggagccctttgaggtctatggtggaaaaggaaatatcttcccataaaaattacacagaagcattctgaggaacatctttgtgatgtgggcattcatctcacagagttgaaactttcttttgattgagcagttttgaaacattctttttgtagaatctgcaagtggatatttggagcactttgggtcctatggtggaaaaggaaatgtcttcatataaaaactgcacagaagcattctgacaaacacttttgtgatgtgtgtattcaattcgcagagttcaacctgtcttatgatagaacagttttgaaactctccttttgtagagtctgcaaccgtatatttggagccctttgtggacgatgttggaaaaggaaatatcttccataaaaattacacagcagcattctgaggaacttctttgtgatgtgtgcattcatctacgaaagttgaacctttcatttgattgagcagttttgaaacactctttttgtagatctgcaagtggatatttggagcgatttgaggcctgttgtgggaaaggaaatatcttcacataaaatctacactgaaacattcttacaaacatctttttgatgtgtccattcatcacacagagtttaacatttcttttgattgtacagtttggatatacactttttgtagaatctgcaactggatatttggagagctttgaggccttttgtcgaaaagaaaatatcttcacatgaaatctgcacagaagtattctcagaaacttctttctgatgtgtccattcatctcacagagttgaacttttcttttgattgaacagttttgaaacactctttttgtagaatctgcaagttttatttggagcactttgatacctacagtggaaaaggatatatcttcacattaaaaactacacagaagcattctgagaaacttctttgtggtgtgtgtattcatctcacagagttgaacctatcttttgattgagcagatttgaaactctctttttgtagaatctccaagtggatattttgagcctttgtggcctatggttgaaaaggtaatatcttccaataaaaactacaaagaagctttctgagaatcttgtttatgatatgtgcatttacctcacagatttgaacctttctttggattaagcagttttgaaaaactcttttgtagaatctgcaagtggatatttaagcactttgattcctatggtggaaaaggaaatatcttcacataaaaactagacagaagcattctgagaaacttctatgtactgtgtgcattccacacacagagtagaaactatcttttgatagtacattattgaaattctccttttgtagaatctgcaagtggatatttggagctctttgaggccaatgatggaaaaggatcttccaataaaaacaacaaagaagcattctgagacacttccttgtgaggtgtgcgttcatacccagagttgaacttttcctttaattgagcagtttggaacacctttttgtagaatctacaagtggatatttgtagcactttgagggctatgttggaaaagaaaatatcttcacataaaaactacacagaaaccttctgagaaacttctttgtgatgtgtgcattcatcacatggagttgaacctttcttttgattgaacagtttggaaacactcttttcatagaatctgcaagtggatatttggagtgctttgaggtgtattgtggaaaaggatatatcttcacataaaaactagacagaagcattctcagaaactgctttgtgatgtgtgcattcacctcacagactggaaccgttcttttgatagagcagttttgacacagtcttttagtagaatctggaagtgaatagttggatcccttgaaggcctattgtggaaaaggaaatatcttcaaatgaaaactacacagaagcattctgagaaaccactttgtgatgtgtgcaacaactcacagagttgaacctatcttttgatagagcagttttgaaactcactttttgtagaatccccaagtgtatatttggaaccctttgcgtcctatggtggaaaaggaaatatcttcccataaaaactacacagaagcattctcagaaacttctttgtgatgtgtgcattcaactcaaagagttgaaactatctttttatagagcagttttgaaactctctttttgaacaatctgcaagtggatatttggagtgctttgaggccttttgtggaaaaggaaatatcttcacataaaaactatacagaagcattttcagaaaattctttgtggtgtgagcattgatctcacagagttgaaccattttttgattgagcactttggaaacactcctatagtagaatctgcaagtggatatttgcagcccttggagggcaattgtggaaaaggaaatatcttcacataaaacctacacagaagcattctcagaaacttctttgtgatgtgtgcattaaactcacagtgttgaaccaatcttttgattgagcctatcttttgattgagcagttttgaaactcttttttgtataatctgcaagtggatatttggagccctttgtggcttatggtggaaaaggaaatatctgcaaatagaactacacagaagctttctgagaattttttttgtgatgtgtgcattcatcttacagagttgaaactttcttttcattgagcagttttgaaacactcttttcataaaatctgcaagtggatatttggagtccttggaggcctattgcggaaaaggaaatatcttcacataaaagctacacagaagcagtctgagaaattactttttgatgtgtgcattcatctcacagagttgaaccttccttggattgagcagttttgaaacactctttctgtagaatatgcaagtggatatttggagtgcttttaggcctattgtggtaaaggaaatatcttcaaataaaaactacacagaagcattctgagaaacttctttgtgatgtgtgcattcaactcacagagttgaacctatcttttgatagagcagttatgaaactcgcttttgtagaatctgcaagtcgatatttgtagccctttgcagtttattgtggaaaaggaaatattttcacataaacactacacagaagccttctgagaaacttctttgtgatgtgcattcatttcacagcgttgaacctctcttttgattgagcagtttggaaacacttttttggagaatctgcaagtggatatttgtagcgctttgaggagtattgtggaaaaggaaatatcttcacataaaaactacaaagaagcattctgagaaagttctttgtgatgtgtgcattcacctcacagagctgaacttttcttttgcttgagcagtttggaaacactcttttagtagaatcgggaagtggatagatttagctctaggaggcctattgtggaaacggaaatatctgcacatgaaaactacacagaagcattctgagaaaccactttgtgttgtgtgcaatcaagtcacacagttgaacctatcttttgatagagcagttttgaaactctctttttgtagaatctccaagtggatactggaacccttagcatcctatggaggaaaaggaaatatcttcacataaaaacttcacagaagcattctgagaaacttctttgtgatgtgtgcattcaactcacagagttgaagctatcttttgatagagcagttttgaaactctctttttgcagaatctgcaagtggatatttggagcccttggtggcctatggtggaaaagcaaatatcttcacctaaaaactacacagaaggattctgagtatctactttgtgatgtgggcattcatctcacagtgttgaaactctcctttgattgagcagtttggaaaaactctttttgtagaatctgcaagtggatattaggagcgctttgaggcctattgtggaaagggaaatatcttcacataaaaaatacacagaagcattattagcaacttctttgtgatgtgcgcattcatctcacagaattgatccttttttgatcgagaagtttggaaacactcctatagtagaatctgcaagtggatatttggagcccttggaggcctattgtggaaaaggaaatatcatcacataaaacctacgcagaagcattatgagaaacttctttgtgaattgtgcatccatctcacaccgttgaaactttcttttgatagagcagttttgaaacactattttcataggatctgcaagtggatattttgagcacttttgggcctatggtggaaaaggaaatatcttcacataagaacaacacagaagcattctgataaacttctttgtgattcgtgcattcatctcaccggtttgaacctatattttgattgtacagttttgaaacactcttattatagactctgcaagtggatatttgaagcactttgaggcctgttgtggaaaacgaaataacttctaataaaaactacacagaagcattctgagaaacttctttgtgatgtatgcattcaacttacagagttgaacctatcatttgattgaagacttctgaatctctctttttgtaaaatctgcaaatggatatttggagccctttgcagcctattttggaaaaggaaatatcttcacataaaaactacacagaagcattatgagaaacttctttgtgacgtgtgcattcatctcacagaggtgaacctttctttggattgagcagttttgaaacactttttttatagaatttgcaagtggataattgaagcactttgaggcctattgtggaaaggaaatatcttcacttaaaaattgcacagaagcattctgagaaacttctttgtgatgtgtgcattcatctcacagagttgaacctttcttttcattgagcagtatggaaacaatcattttgtagaatctgcaagtggatatttggagcgctttgagacctattgtggaaaatgaagtttcttcacaaaaaattacacagaagcattgtgaaaaactactttgtgatgtgtgcattcatctcacagagctgaacctatcttttgatagagcagttttgaaactctactttgtagaatctgcaagtggatatttgtagccctttgtggcctatgttggaaaaggaaatgtattcacataaaaactacaccaaagcattctgagaaacttcttttgtgctatgtggattcatctcacagagttcagcctttcctttgattgagcagttttgaaacacactttttgtagaatatccaggtggatatctggagcactttctggccttttgtggaaaaggaaatatcttcacataaaaactacatagaagcattattggaaacttctttgtgatgtgtgcattcatctcactgtgttgaacctttcttttgattgagcaattttgaaacactgtttttgtagaatctgcaagtggttatttagagagcttggaggcctattgtggaaaaggaaatatcttcacataaaaactgcacagaagcattctgagaaacttctttctgacgtgtgcattcaagtcacaatgttgaacctatcttctcatggagcagttttgaaactctctttttgtagaatcttcaagttgttttttggagccctttgcagcttatggtggcaaaggaaatatctccatataaaaactacacagaagcattctgagaaacttctttgtgatgtgtgcattcatttcacagagttgaacgttttttgattcagcagttttgaaacactcattttttagaatatgcaagtggatatatggagcgttttgaggccttttgtggaaagggaagtatcttcacaaaaaaactacgcagaggcattctgagaaatatcttgtgaagtgtgcattcatctcatagagttgaactttgttttcatcgagcagttttgaaacactctttttgtagaatctgcaagtggatatttgtagcattttgaggcctattgttgaaaatgaaatatcttcacataaaaactacacggtgtaaggaattgatccagtttcagctttctacatatggctagcaagtattcccagcaccatttattaaatagggaatcctttccccatttcttgtttttcttaggtttgtcaatgatcagatagttgtatgaatgtaacattatttctgagggctctgttctgttccattgatctatatctctgttttggtaccagtatcatgctgctttgtagtatagtatgtagccttgtagtatagtttgacgtcaggtagcgtgatggctccagctttgttgttttggcttaggattgatttggtgatgcgggctcttttttgattccatatgaactttaaagtagttttttccaattctgtgatgtaagtcattggtagcttgatgaggatggcattgaatcaataaattaccttgggcaatatggccattttcatgatattgattcttcctacccatgagcatggaatgttcttcgatttggttgtatcctcttttatttcattgagcagtgttttgtagtactccttgaagaggtccttcatgtcccttataagttggattcctaagtattctattctctttgaagcaattgtgaatgggagttcactcatgatttggttctctgtctgtctgtcactggtgtataagaatgcttgtgatttttgtacattgattttgtatcctgagacctagctgaaattgcttatcagcttaaggagatttccggctgagacaatggggttttctagatatacaatcatgtcatctgcaaacagggacaatttgacttcctcttttcctaattgaatacactttatttccttctcctgcctaattgccctggccagaacttccaatactatgttgaataggagtggtgagagagggcatccctgtcttgtgccaattttcaaagggaatgcttctagtttttgcccattcagtatgatattggctgtgggtttgtcatagatagcttttattattttgagatacgtcccatcaatacctaatttattgagagtttttagcatgcagagttgttgaattttgtcaaaggccttttctgcatctattgagataatcatgtggttttcatctttggttctgtttacatgctggattgcatttattgatttgcatatattgaaccagccttgcatcccagggatgaagtccacttgatcatggtggataagccttttgatgtgctgctggattgggtttgccagaattttatagaggatttttgcatcaatgttcatcaaggatatttgtctaaaattatcttttttgattgtatctctgcccagctttggtatcaggatgatgctggcctcataaaatgagttagggaggattccctcttttgctattgattggaatagtttcagaaggaatgataccagttcctccttgtacctctggtagaattcagctgtgaatccatctggtcttgggctctttttggttggtaagctatttattattgcacaatttcagatcctgttattggtatattcagagagtcaacttcttcctggtttagtcttgggacagtgtatgtgtcaaggaatttattcatttcttctagattttctagtttaattctgtagaagtgtttgtagtattctctgatggtagtttgtatttctgtgggattggtgattaaagacttaagtattagacctagaaccataaaaaccctagaagaaaacctagacattacaattcatgacataggcatgggcaaggacttcatgtctaaaacaccaaaagcaatggcaacaaaatccaaaagtaacaaatgggatctaattaaactaaagagcttctgagcaacaaaagagactaccatcagagtgaacaggcaacctaaagaatgggagaaaatttttgtaacctacttatctgacaaagggctgatatccagaatctacaatgaactcaaacaaatttacaagaaaaaaacaaacaaccccatcaaaattgggtgaaggacatgaacagacacttctcaaaagaagacatttatgcagccaacaaacacatgaagaaatcctcaccatcactggccatcagagaaatgcaaatcaaaaacagaatgagataccatctcacaccagttagaatggcaatcattaaaatgtcaggaaacaagaggtgctggagcggatgtggacaaataggaacacttttacactgttggtgggtctgtaaactagttcaacctttgtggaagtcagtgtgggattcttcagggatctagaaccagaaataccatttgacacagccatcccattactgggtatatacccaaaggactataaaccatgctgctatgaagacacatgcacaagtatgtttattgcaggactattcacaatagcaaagacttggaaccaacacaaatgtccaaaaatgatagactggattaagaaaatgtggcaaatatacacaatggaatactatgcagccataaaaaatgatgagttcatgtcctttgtagggacatggatgaaattgggaatcatcattctcagtaaactatcacaagtacaaaaaacagaacaccgcatattctcactcataggtgtgaattgaataatgagaacacatggacacaggaaggggaacatcacactcaggactgttgtggagtcaggggttgggggagggatagctttaggagatatagctaatgctaaatgacgagttaatgggtgcaacacaccagcatggcactggtatacatatgtaactaacctgcacatggtgcacaggtactctaaaacttaaagtataataacaattaaaaaaacacacaaaaagagattctcacacacacaaacacacacacaaatacatggaagctttctgagaaacttctttgtgatgtgtgcattcatctgacagagttgaacctttcttttgattcagcactttggaaacactctttttgtagaatctgcaagtggatatttggagtgatatgaggcctatggtggaaaaggaaatgtcttcacataaaaactacacagaagcattctgagaagctactttgtgatgtgtgcattcatctcacagacctaaagctttcttttgattgagcattttgaaacattctgttgggagaatctgcaagtggatatttggagcgctttgaggattattgtggaaaaggaaatatcttcacataaaaattacacagaggcattctgagaagcttttttgtgatgtgtgcattcatctcacagagttgaaattttcttttgattgagcagttttgaaacattctctttgtagaatctgaaagtggatatttggagtgctttgaggcctattgtggaaaaggaaatatattcacataaaaactacaaggaaacattctgagaaacttctttttgttgtgtgcattcatctcacagatttgaacttttcttttgcttgagcagtttggaaacactctttttgtagaatctgcaaggggatatttggagcactttgaggcctattgagaaaaaggaaatatcttcacaaaaaaccacacagaagcattctgagaaacttctttgtgatgtgtgcattcaactcacagtgttgaacctatcttttcaatgagcacttttgaaactcccttttttagaatccagaagtggatatttggagccttttgtggcctatgttggaaaaggaaatatcttcacatgaaaactacacagaagcattctgagaaacttctttgtgatgtgtgcattcacctcacagggttgaacctatattatgattaagcagtttggaaacactctttttgtagaatctgcaagtggatatttggagcgctttgatgcctacggtggaaaaggaaatgtcttcacataaaaactacacagaagcattctgagaagctactttgtgatgtgtgcattcatctcacagagctaaacctttcttttgattgagcagttttgacacactctgtttgtagaatctgcaagtgtatatttggagcactttgaggcctattgtggaaaaggaaatatcttcacataaaagctacaaagaggcattctgagaagcttttttctgacgtgtgcattcatctcacagagtcgaaactttcttttgattgagcagtttggaaacattctgtttgtagaatctgaaagtggatatttggggcgctttgaggcctattgtggaaaaggaaatatattcaagtgaaaactacacagaagcattctgagaaacttctttttgttgtgtgcattcatttcacagagttgaacctttcttttgcttgagcagtttggaaaaactctttttgtagaatctgcaagaggatatttggagcactttgaggcctattgtgaaaaaggaaatatcttctaaaaaaactatacagaagcattccgagaaacttctttgtgatgtgtgcattcaaatcagagtgttgaacctatcttttgaatgaacacttttgaaactcccttttgttgaatctacaagtggatatttggaaccctttgtggcctatgttggaaaaggaaatatcttcacataaaaacaacaaagaagcatttggagaaacttctttaagatgtgttcatctcacagatttgaaacattctttttattgagcagttttgaaacactcttcttacagtatctgcaagtggatatttggagccccttgagacctattgtggaaacggaaatatcttcacataagaactacacagaagcatcctgagaaacttctttgtgatgtgtgcatttatctcacagagttgaacctgtcttttcattgagcagttttggaacactctatttgtagaatctgcaagtgcatattaggagtgctttgaggcttattgtggaaaaggaaataccttcacataaaaactacacagaaacatcctcagaaacttctttagatgtgtgcattcatctcacagagttgaacctttcttttcgttgagcagtttggaaaaactcttttagtagaatctgcaaatggatatttagagcccttggaagcctattgtggaaaaggaaatatcttcacataaaaagtccacagaagcattctgagaaacttctttgtgacgtgtgcattcatctcacaaagttgaacgtttttttttttttttattgagcagcttggaaacactctttttgtgggatctccatgtggatatttggagcactttgaggcctatggtggaaaaggaaatatcttcgcatgaaaactacacagaagcattctgagaaacttctttgtgatgtctgcattcatctcacagagttgaatctttcttttgatggagcagttttgaaacactctttttgtagaatctgcaagtggatatttggagcgctttgaggcctaatgtgaagaaggaaatatcttcacataaaaactgcacagaagcattctgagaaacttctttatgatgtgtgcattcagctcacagagttgaacctatctttttaaagagcagttttgaaactctcctttcgtgtaatcttcaagtggatatttgaagccctttgcagcctatggtggaaaaggaaatatcttcacataaaaactacccagaagcattctgagaaacttctttctgatgtgtgcattccactcacagagttgaacctatcttttgattgagcagttttaaaactctctttttgtagtatctgcaagtggatatttggagtgctttgaggcttatggtggaaaacgaaatatcttcacataaaaacaacacagaagcattctcagaatctcctttgcgatgggtgcattttcgtcacagagttgaacttttcttttgactgagaagtttggaaacactctttttgtagaatatgaaagtggatttttggagtgctttaaggcctatggtggaaaaggaaacatcttcacataaaaactacacagaagcattctgagaaacttatttgtgatgtgtgcattcatttcacagtgataaacctttcttttgattaagcagttttgaaacactctttttgtagtttctgcaagtggatatatggagagatttgaggcctgttgtggaaaaggaaatatcttcacataataaccagacagaagcattctgagaaacttctttgtgatgtgtgtattcacctcacagaatagaacattgcttttgattaagcagttttgaaaccctctttttgtacaatctgcaagtggatgcaatggcatccgcgattgcccaggcttgcttaagtaaataaagcagccggggagctagaactgggtgggcccaccatagctcaagaaggcctgcctgcctctgtaggctccacttctgggggcagggcacagacaaaccaaaagacagcagtaacctctgcagacttaaatgtccctgtctgacagctttgaagagagcatcggttctcccagcacacagctggatttctcagaatgggcagactgcctcctcaagtaggtccctgactcttgactcctgagcaccctaactgggaggcacccccaagcaggggcagactgacaccttacacggctgggtactcttctgagacaaaatttccagatgaacaatcagagagcagcatttgcggttcacgaaaatccgcttttctgcagccactgctggccaatgctgctgttacccagaaaaatagggtctggagtggacctccagcaaacttcaacacacctgcagctgagggtcctgtctgttagaaggaaaactaacaaacagaaaggacatccacaccaaaaacccatttgtacatcaacaacatcaaagacaaaagtagataaaaccacaaagatggggaaaaaacagagcagaaaaactggaaactctaaaaaccagagcacctctcctcctccaaaagaatgcagttcctcaccagcaacggaacaaagctggatggagaatgactttgacaacttgagagaagaaggttcggatgacgaaactactccgagctacagcaggaaattcaaaccaaaggcaaagaagttaaaaacattgaaaaaaatttagacgaatgtataactagaataaccaatatagagaaatgcttaaaggagctgatggagctgaaagccaaggctcgagaactacatgaaaaatgcagaaacctcaggagccgatgcaatcaactggaagaaagggtatcagtgatggaagatgaaatgaatgaaatgaaagcgagaagggaagtttagagaaataaaaagaaatgagcaaagcctccaagaaatatgggactatgtgaaaagaccaaatctacgtctgattggtgcacctgaaagtgatggggagaatggaatcaagttggaaaacactctgcaagatattatccaggacaacatccccaatctaacaaggcaggccaacattcagattcaggaaatacagagaacgccacaaagatactcctcgagaagaacaactccaagacgcataattgtcagattcagcaaagttgaaatgaaggaaaaaatgttaagggcagccagagagaaaggtagggttacccataaagggaagcacatcagactaacagtggatctctcagcagaaactctagaagccagaagagagtgagggtcaatattcaacattcttaaagaaaagaattttcaacccagaatttcatatccagccaaactaagcttcataagtgaaggagaaataaaatactttacagacaagcaaatgcagagagattttgtcaccaccaggcctgccctaaaagagctcttgaaggaagcactaaacatggaaaggaacaaccggttccagccactgcaaaatcattccaaattataaagaccttcgaggctaagaagaaactccattaactagtgagcaaaatatccagctaacatcataatgacaggatcaaattcacacataacaatattaactttaaatgtaaatggactaaatgccccaattaaaagacacagactggcaaattggataaggagtcaggacccatcagtgtgctgtattcaggaaacccatctcacgtgcagagacacacataggctcaaaataaaaggaaagaggaagatttaccaagcaaatggaaaacaaaaaaaggcagaggttgctatcctagtctctgataaaacagacttaaaccaacaaagatcaaaagagacaaagaaggccattaaataatggtaaagggatcaattcaacaagaagagctaactatcctaaatatatctgcacccaatacaggagcacccagattcataaagcaagtcctcagtgacctacaaagagacttagactcccacacaataataatgggagactttaacaccccactgtcaccattagacagatcaacgagacagaaagttaacaaggatacccaggaattgaactcagctatacactaagaggacctaagagacatctacagaactctccaccccaaatcaacagaatatacatttttttcagcaccacagcacacctattccaaaattgaccacgtagttggaaagaaagctctcctcaacaaatgtaaaaatcagaaattataacagactgtctctcagactgcaatgcaatcaaactagaactcaagattaagaaactcactcaaaaccgctcaactacatggaaactgaacaacctgctgctgaatgactactgggtacataacgaaatgaaggcagaaataaagatgttctttgaaaccaacgagaacaaagacacaacataccagaatctctgggacacattcaaaacagtgcgtagagggaaatttatagctctaaatgcccacaagagaaagcaggaaatatccaaaattgacaccctaagatcacaattaatagaactagaaaagcaagagaaaacacattcaaaagctagcagaagataagaaatagctaaaatcagagaacaactgaaagaaatagtgacataaaaaaccttcaaaaaattaatgaatccaggagctagttttttgaaaggatcaacaaattgatagactgctagcaagactaatgcagaaaaaaagagagaagaatcagatagatgcaataaaaaatgataaaggggatatgaccaccaatcccacagaaatataaactgccatcagagaatactacaaacacctctatgcaaataaactagaaaatctagaagaaatggataaattcctcaacacatacaccctcccaagagtaaaccaggaagaagttgaatctctgaatagaccaataagaggatctgaaattgtggcaataatcaatagcttaccaactaaacagggtccaggaccagacggattcacagccaaattctaccagaggtacaaggaggaactggtaccattccttctgaaactattccaatcaatagaaaaagagggaatcctgcctaactcattttatgaggccagcatcatcctgataccaaagccaggcagagacacaaccaaaaaggtgaattatagaccaatacccgtgatgaacattgatgcaaaaatcctctataaaatactggcaaaccgaatccagcagcacatcaaaaagcttatccaccatgatcaagtgggcttcatccctgggatgtaaggctggttcaatattcagaaatcaataaatgttatccagcatataaaccgaatcaaagacaaaaaccacatgattatctcaatagatgcagaaaaggcctttgacaaaattcaacaactctgcatgctaaaaactctcaataaattagatattgttgggacgtatctcaaaataataagagctatctatgacaaacccacagccaatatcatactgaatgggcaaaaactggaagcattccctttgaaaactggcacaagacagggatgccctctctcaccactcctattcaacatagtgttggaagttctggccagggcaattaggcaggagaaggaaataaagtgtattcaattaggaaaagaggaagtcaaattgtccctgtttgcagatgacatgattgtatatctagaaaatcccattgtctcagcccaaaatctccttaatctgataagcaatttcagctaagtctcaggatacaaaatcaatgtacaaaaatcacaagcactcttatacactagtgacagacaaacagagaaccaaatcatgagtgaactcccactcacaattgtttcaaagagaatgtgtttgctcttgcttttctaattcttttaattgtgatgttagggtgtcaattttggatctttcctgctttctcttgtgggcatttagtgctataaatttccctctacacactgctttgaatgtgtcccagagattctagtatgttgtggatacaaaattaatgtacaaaaatcacaagcattcttatacaccaataacagacaaacagagatccacatcatgagtgaactctcattctcaattgcttcaaagagaatgaaatacctaggaatccaacttacaagggatgtgaaggacatcttcaaggagaactgcaaactactgctcaatgaaataaaagaggatacaaagaaatggaagaacattccatgctcatgggtaggaagaagcaatatcgtgaaaatggccatactgcccaaggtaatttatcgattcaatgacatccccattaagctgccaatgactttcatcacagaattggaaaaaagtactttaaagttcatatggaaccaataaagagcctgcattgccaagtcaatcctaagccaaaagaataaacctggaagaatcacgctacctgacttcaaactatactacaaggctactgtaaccaaaactgcatggtactggtaacaaaccagagatatagctcaatggaacagaacagagccctcagaaataatgccgcatatctaaaacaatctgatatttgacaaacctgagaaaaaccagcaatggggaaattatttcctatttaataaatggtgctgggaaaactggctagccacatgtagaaaactgaaactggattccttccttacaccttatacaaaaatcaattcaagatggattaaagacttaaacgttagacctaaaaccataaaaaccctggaagaaaacctaggaattgccattcaggacataggcatgggcaaggacttcatgtctaaaacacgaaaagcaatggaaacaaaagccgaaattgacaaatggaacctaattaaattaaagagcttctgcacagcaaaagaacctaccatcagagtgaacaagcaacctacaaaatgggagaaaattttcgcaacctactcatcggacaaagggctaatatccagaatctacaatgaactcaaacaaatttacaggaaaaaaacaaacaaccccatcaaaaagtgagtgaaggacatgaacagacacttctcaaaagaagacatttatgcagccaagaaacacatgaaaaaatgctcaccatcactggccatcagagaaatgcaaatcaaaaccacaatgagataccatctcacaccagttagaatggcaatcattaaaaagtcaggaaacaacaggtgctggagaggatgtggagaaacaggaacacttttacactgttggtgggacagtaaactagctcaacccttgtggaaatcagggtggcaattccttaaggatctagaactagaaataccacttgacccagccatcccattattgggcatatacccaaaggattataaatcatgctgctataaaaacacatgcacacataagtttattgcagcactattcacaatagcaaagacttggaaccaacccaaatgtccaacaatgatagactggattaataaaatgtggcccatatacaccatggaatactatacagccataaaaaaggatgagctcatgtcctttgaagagacatggatgaatttggaaatcatcattctcagtaaacaattgcaaggacaaaatccaaacaccacatgttctcactcacaggtgggaattgaacaatgagaacacatggacacaggaaggggaacatcacactctggggactgttatggggtgggggaaggggggcgatagcattaggtgatatacctaatgctaaatgacgaattaatgggtgcagcacaccagcatggaacatatatacatatgtaactaacatgcacattgtgcacaagtaccctaaaacgtaaagtaaaataaaataaaaaataaaaaagaatgcttacaaactgctcaatccaaagtaagcttccactccttgagttgtatgcacacatcacaaaggagtttctcagaacgcttcttgctagtttttaggtgaggatatttccttttatactgtaggtttcaaagctctccaaatatccatttgcagattctacataaagaatgtttccatactgctcaagcaaaagaaaggttccactctgtgagttgaatgcacacatcacaaagaagtttctgagaatgattcagtctagtttttaggtgaagatatttccttttacatcataggcctcaaagcgcttgaaatatccacttgcagattctacaaaaagagtgtttcaaaacttcccaacgaaaagagttgctcaactgtgtgagatgaatgcacacatcaaaaaggagtttctcagaatgcttctgtcttgtttttatgtgaagatatttactttttcaccataggcatcaaatcgctccaaatatccacttgcagattctacagaaagagtgtttcaaaactgctcaatcaaaagaaaggttcaactctgtgagatgaatgcacgcatcacaaagaagtttctcagaatacctctgtctagtttttatgtgaagatatttccttttccaatataggccacaaagcgctccaaatatccacttgcagattctacaaaaagtgtgtttctcagaatgcttctgtctagttcttatatgaagataactccttttcctctatagaccaaaaagcactcaaaatatccttttggagatagtacaaaaagcctgtttccaaactgctcaatcaaaagaaagttttaactctgtgagttgaaagcatacatcacaaagaagtttcccagaatgcttctgctagtttttatgtgaagatatttcctttcccaatataggcctcaaacgctccaaatatctacttgaagatactagtaaaagagtgtttcaaaactgctcaatcaaaacaaaggttcaactctgtgagatgaatgcacacatcacaaagaagtttcttgcaatgcttctgtgtagtttttatgtgaatatatttcctattccacctgtggcctcatagtgctccaaatatccttttgcagataatacagaaagactctttccaaactactcaatcagagaaaagtttcaagtctgtgagttgaatgcgcacatcacaaagaagtttctcagaatgcttctgtctagtttttatgtgaagatatttccttttccaccagagccctcaaagggctccaaatatccacttgcagaatctacaaaatctgtggttcaaaactgctcaatcaaaagaaagtttcaactctgggagatgaatgtgcacatcacaaagatgtttcccagaatgcttctgtctagtttgtatgtgaagatattttcttttccactacaggctgcaaagctctccaaatatcccgttgaagattctaaaaaaagagtttttcaaaactgctaaatcaaaaaaatttcaaatctgtgagatgaatgcacacatcccaaattgtttctcagaatgcttctgtttagtttttacgtgaatatatttccttttccactacaggcctcaaataatttgaaatatccatttgcagatactacaaaaagactgttcccaaactgcttaatgaaaacaaatgttcaactgtgtgcgttgaatgcacacatcacaaagaagtttctcagaatgcttctgtcttgtttttatatgaagatttttccttttccatcataggcctcaattcgatctgaatatccatctgcacattctacaaaaacagtgtttcaaaactgctctatcaaaagaaaagttcaactctgtcaaatgaatgtacacatcaaaacgtagtttttctgaatgcttctgtctagtttttatgtgaagttatttccttttccaccataggccacaaagggctccaagtaaaaaattgcagattctataaaacgagtgtttgaaaactgctcaatcaaaagacaggttcaactctgtgtgatgaatgcacatatcacaaagtagtttcttacaatgcttctgtctagtatttatgcgaagatttttccttttccaccatatgcctcaaatcgctcctaatatccacttgcagattctacaaaaagagtgtttcaatagtgctcaatcaacagaatggttcagctctgggagatgaatgcacacatcccatagtagtttctcagaatgcttttgtctcgtttttatgtgaagatattcccgtttacactatagggctcaaaccgctccaaatatccatttgaagattctacaaaaagtgtttctgaaaactgctcaataaaaaaaagcttcaactctttgaaatgaatgcacacatcccaaataatttccaagaatgcatgtgtctagtttttatgttaagatatttccttttccaccataggcctcttagtgctccaattatccatttgcagatactgcaaaaagactgtttccaaactgctcaaaaaatgaaaagtacaactctgtgagttgaatacacacatcacaaagaagtttctcagaatgtttctgtctagtttttatgtgaagatatttccttttccaccatagtcctcatagtgctccaaatatccacttgcagattctacaaaaggagtgtttcaatactgctcaatcaaaagaaaggttcaactctgtgagatgaatgcacacatcaaaagaagttactcagaattcttctgactagattttatgtcaagatatttccttttccactataggcttcaaagcgcttcaaatatacatttgcagataatataaacagaatgtttccaaactgctgaatcaaaagaaaggtacaactcagtgagttgaatgcaaacatcacaaacaattttctcagaatgcttctgtctattttatatctgaagatatttccttttccattataggcctcaatacgctccaaatatccattcaaagatactacaaaaagactgtttccaacttgctcaatcaaaaaaacattgaactctgtgatttgaatgcacacatcacaaagtagtttctcaaaatgcttctgtctagtttttaggtgaagatgtttccttttccaccataggcctcaaatcactccaaatatcctcttgcagattccacaaaaagagtgtttgaaaaactgctcaatctaaagaaaggttcacctctttgagatgaatgtacacaacacaaagaagtttctcagaaagcatctgtgtagttttatgtgaagatatttccctttccactataggtctcaatgcgctccaaatgtccacttgcagatactacaaaaagtctgtttccaaactgcacaatcaaaagaaaagttcaactctgtgagttgaatgcccacatcacaaaaaagtttctcaggattgtgaagtctagtttttatgtgaagatattcctttttctactataagtcacagaacactccaaatagccacttgcagatcctacaaaaatagtgtatcaaaactgctcaatcaaaggaaagtatcaactctctaagatgaatgcacacataacaaagaagtttctcagaatgcttctgtttagtttttacgtgaagatttttccttttccacgataggcctcaaagcgctccaaatacccattttcagattctgctaaaataatctttcaaaactgctcaaggaaaagaaagtttcaaccctgtgagatgaatgcaaacgtcacaaagaagtttctcagaatgctactatctagtttctatatgaagatatttccttttccaccattggtctcaaagctctccaaatatccacttgcagattctacaaaaatagtgtttccaaactcctcaatgaaaagaaagtttcaagtctgtgggatgaatgcacacatcacaaagaagtttaacagaatgcttccatctagtttttatgtgaagacatttcattttccactgtaggcctcgatgtgctccaaatattcatttgtagatgctacaaaaagactggtaccaaactgttcaatcaaaagaaaagttgaactctctgagttgaatgcactcatctcaaggaattttctaagaatgcttgtgtctagtttttatgtgaagatatttcattttccactataggccacaaagtgctccaagtatccacttgcagattatacaaaaagagtgtttcaaaactgctcaaacaaaggaaatgttcacatctgtgagataaatggacacataacaaagaagttcttcagaatgattgtgtctattttttatttgaagatatttccttttccattataggctgcaaaacactccaaatatccatttgcagttaatataaaaagactgtttccatactgctgaatcaaaagaaatattcaactctctgagttgaatccaaacatcacaaagaattttctcagaatgtttctgtctagtttttatgtgaagatacttccttatcccctataggtctcattgcactccaaatatccatttgaagatagtataaaaaagacggtttccaaactgctcaatcaaaagaaaggttcacctctgttagttgaatgcacacatgggaaaaaagtttctaagaatgcttctgtgtagcttttatgtgaagatatttcctttccaccataggtctcaaagcgctccaaatatccacttgcaaattctacaaaaataatgtttcaaaactcctcaatcaaaagataggttcaactctgtgagttgaattcacacatcataaagaaatttctcacaatgcttccgtctagtttttatgtgaagatattttccaccacaggccgcaaatcactccaaacatctgcttgcagattcgacaaaaagagtgtttcaaaactgttcaatcaaaagaaagtttcaactttgtgaggtgaatgcacacatcaaaactaagtttctcagaatgtttctgtctagtttttatgtgaagagaattccttttccagtataagccacaatgcgattcaaatatccacctgcagatcctacaaaaagagtgttacagaactgctcaatcaaaagaaaaattcaaccctgtggagatgaattcacacatcacaaagatgtttctcagaatgcttctgtatagttgttaagtgaagagacttccttttccaccacaggcctcaaagcagtccaaaatccttttgcatgtagtaaaaaaagatggtttccaaacttcacaatcaaaagaaaggttcaactctgtgagatgaatgcacacttcacaaagaagtttctcagaatgcttctgtctagtttttatgtgaagatatttccttttccacaataggcctcaaagtgctccaaatatactcttgcagatactacaaaaatacggtttccaaactgctcaataaaggaaaggtacaactctgtgagtgcaatgcacacatcacaaagaagtatctcagaatgcttctgtctattttctatgtgtagatatttccttttctaccataggccacaaagcactccaaatatccacttgcagattttacagaaacattgtttcaaaactgctcaatctaaagaaaggttcaactgtgtgagacaaatgcacacatcacaaagaagtttctcaaaatgcttctgtctagtttttatgtgaagatattaccttttcccctatagcccgcaaagcactccatatatccacttgcagattctacagacagagtgtctcaatactgctcaatgcaaaaaaatttcaactccgtgagatgaatgcacacatcacaaagaagtttctcagaatgcttctgtctagtttttatgtgacgatatttccttttccaccagaggcctcaaaaccctccaaatatactcttgcagacactacaaaaatacggtttccaaactgtttaatcaaaagaaattttcaactctgtgagtgcagtgcacacatcacaaagaagtatctcagaatgcttctatctattttctatgtgtagatatttccttttccaccgtaggcctcaaagcacttgaagtatccacttgcagattctacaaaaagagtgtttcaaaactgctcaatcaaaagaaaggttcaactctgtcagttgaatgcacacatcacaaagaagtttctcagaatgcttctgtctggttttgatgtgaggatattaccttttccactataggccacaaagcgctccgaatatccagtttcagaatctacaaaggagtgtttcaaaactgctcaatcaaaagaaagtttcaactctgtgagatgaatacacacatcacaaagaagtttctcagaatgcttctgtgtagtttttatgtgaagatatttccttttccactatagtctccaaagcgctccaaatatccatttgcagatacaagagaaagactatttccaaactgctcaatcaaaacaaatgttaaactctgtgagttgaatgcacacatcacaaagaagtttctcagaatgcttctgtctagtttttatgtgaagatatttccttttccacaataggactcaaagggctccaaatatccacttgcagattcttcaaacagagtgtttcaaaactgctcaatcaaaaggaaatttcaactctgttagatgaatgcacacaaaagaaagaagtttctgagaatacttctgtctagtttttatgtgaagatatttccttttccaccataagccccaaagcactccaaatatccacatgcagattctacataaagaatgtttcaaaactgctcaataaaaggaaaggtttagctatgggagatgaatgcacacatcacaaagaagtttctcggaatgcttctgtctagttttcatgtgaagagatttccttttccactaaaagacgcaaagctctccaaatatccacttgcagattctacagaaagagtgtttcaaaacggctcatcaaaagaaagtttcaattctatgagatgaatgcccacatcacaacgtagtttctcataatgtctctgtctagtttttatgtgaagatatttccttttccatcatagtccccaaagccctccaaatatccatttgcagatacttcaaaaacattctttccaaactgcttaatgaaaagtaaggttcaaatctgtgagatgaatgcacatatcacaaagaagtttctcagaatgcttctgtcttgtttttatgtgaagattattccttttccaccataggcctcaatgcgctccaaagatccatttgtagataatacaaaaagagtgtttccaaaaggcagaatcaaaagaaatgttcaactctgtgagatgaatgcactcatatgaaagaggtttctcagaattcttctgttaagttttttgtgaagataattcctattaccgcagagccatcaaatggctcccatatatccctttacagatcctacaaaacgactgtttccaagatgatcaattaaaagaaagtttcaaatccatgagatgaatgcacacataacaaatagtattctcagcatgcttttgtctgctttttatgtaaagatatttccttttccaccataggcctcacagtgatccaaatatccacttgcagatactacaaatgagtgtttcaaaactgctcaatcaaacgaaaggaaccacactgtgagatgaatacacacatcacaatgtagtttctgagaatgtttctgtctactttgtatgtgaagttatttccttttcctccataggtttcaaagcgctccaaatttccatttgcagacactacaaaaagattatttccaaattgctcaatgaaaagtaaggttcaaatatttgagatgaatgcacacatcacaaagaagtttctcagaatgcttctgtcttgtttttatgtgaagattgttccttttccaccataggcctcaatgagctccaaagatccatttgtagataatacaaaaagagtatttctgaactgctcaatcaaaagaaatgttcaactgtgtgggatgaatgcactcataagaaagaagtttctcagaatgctgctgtgtagtttttatgtgaagatatttccttttccactataggcctcaaaagctccaaatatccatttgcagatactgcaaaagactgtgtccaaactgctcaatcaaaagaatggttcaactctgagagattaatgctcatatcaccaagaatttttcagaatgtttctgtctaatttttgtgtgaagatattttcttttgcaccataggactcaaagcgctccaaatatacgtttgcagatactgcagaaagactgtttcgaaactgtgcaatcaaaagaaatgttcaacactgtgagattattgcacatatcactaagtagtctctgagaacgcttctgtcttgtttttaggtgaagatatttccttttccaccataggcctcaaagtcctccatatatccactgcagattctacaaaaagaatgtttcaaaactgctcaatcaaaagaaagtttcaactctgtgagatgaatgtgcacatcacaaaacagtttctcagaatgcttctgtctaatttttatgtgaagatatttccttttccactatacaccacaaagggctccacatatccacctacagattctacaaagagtgtttccaaactgctcaatcaaaagaaagattcaaccccgtgagatgaatgcacacatcacaatgtagtttttcagaatacttctgtctattttttatgtaaagctatttccttttccaccatatgcccaaagcgctccaaatatccacttgcagatactacaagaagactgttaccaaactgcttagtaaaaagaaatattcaactctgtgagataaatgcacacatcacaaagaagtatctcagaatacttctgtctagtttttatgtgaagatatttccttctcctccataggcctcaaagtgctccaaataaccatttgcagatagtacaaaaaggctctttccaaactgctcaatcaaaagaaaggttccactctgtgagatgaatgcacacatcaaaaagcagtttgtcagagtgtttctgtctagtttttatgggaatatagtttcttttccaccatagacctcaaacactccaaatatccacttgcaggttctacaaaaagtgtgtttccaaactgctcaatcaaaagaaaagttcaactctgtgagatgaattcacaaattcagaaagaagtttctcagaatgtttctgtttagtttttacgtgttcgtaattcctttttcaccataggccacaatgtgctccaaatatccatttgcacaaacttcaaaacgactgtttccaaacttgtcaatcaaaagaaaggttcacctctgtgagatgaagatacgcatcacaaagaagtttctcagaaaacttctgtctcgtttttctgtgaagttatttccttttccaccctaggcctcaaagcgctgcaaatatccacttgtagattctacaaaacctgtgtttcaaaactgctcaatcaaaataaattttcaactctgagatgaaagcagacaacacaaagtgtttctcagaaagtttctatctattttttctgtgaagataattcttatttcccagaggcatcaaagggctcacaaatatccctttccagattctgcaaaacgactgttccaaactgctcaatcataagaaatgttcaactctgtgagataaatgcacacataacaaagaagtttctcagaatgcttctgtcaagttagtatgagaaaatatatctcttttcaccacagaactcaatgagctcgtaatatccatttgcacatactacaaaaagattgtttccaacatgctcaatgaaaacaaagggccaacaccctgagatgaattcacacatcacaaagaagtttctgagaatgcttctgtctagtttttatgtgaagatatttccttttccaccataggcctcaaagtactccaaatatccacttgcagattcttaaaaagagtgtttccaaactattcaatcaaaagaaagattcaactccgtgagatgattgcacacatcacaaagaggtttctcagaatgtttctctctagtttttatgtgaagatatttcctttcccaacatagtcctcaaatcgctcaaaatatcaacttgcagattctaaaaaggagtgtctcaaaactgctcaatcaaaagaaaaattcaactctgtgagatgaatgcacacatcacgaagaagtttctcagaatgcttctatccagtttttatgtgaagatttttccttttctaccataggctgcaaagctctccaaatattcaattgcagatactacaaaaagactgtttccaaactgctctataaaaagaaagtttcaactctgtgagaataatgcgcacatcacaaagaagtttctcagaaggcttctgtctagtttttatgtgaagatatatccttttccaccataggcctcaaagcgctccaaaaattgtattgcagattcaacaaaaagagtgtttcaaaactgctcaattaaaagaaaggttcaactctgtgagatgaatgcacacatcacaaagaagtttctcagaatgcttctgtctagtttttgtgtgaagttcattccttttccaccataggcctcaaatcactctgaatatccaaatgcagattctcaaaaaagagtgtttccaaatggctcaatcaaaagaaatttcaactctgtagatgaatacacacgtcacaaagaacttcctcagattgcttctgtctagtttttatgtgaagatatttccttttccaccataggcctcaaagcactccaaatatccatttgcagatactacaaaaagactgtttccaaattgctcaatcaaaagaaagtttcaactctgtgagatcgagacacacgtcacaaagaaatttctcagaaattttctgactagtttttatttgaagaaatttccattatgactagaggccttaaagtgctccaaatattatcatgccgatactacaaaaaagactgtttccaaactgctcaataaaaaaaaaaggtttatctctgtgagatgaatgcacacatcacaaagaagtttctcagaaagtttctgtcgagtttttatttgaagacatttcccatttccccttaggtctcaatgggctcagaaatgtaccattgcagagtctacaaaacgaaggtttccaaactgctaaatcaaaagaaagattcaattctgtgagatgaatgcaaacatcacaaatagttttctcagaatgcttctgtctagtttttatgtgaagatatttctttttcaccatatgcctcaaacagcacagaaatatccgtttgcagattgtacaaatactggttccaaactgctcaatcaaaagaaaggctcaactctgtgagatgaaggcacatatcacaaagaattttctcagaatgcttctgtctagtttctatgtgaagatatttcctttttcaccattggcctcaaagcactccatatatccatttgcagatactacaaaaatactgtttccaaacttctcattcaaaaaaaaggttcaactatgtgagttgaatacacacatcacaaagaagtttgtcagaatccctctgtctagtttttatgtgaagatatttccttttccaccatattcctcaaagcgctccaaatatccatttgcagattctaccaaaagagtgtttcaaaactactcaatcaaaagaaaaggtcaactctttgagatgaatgcatacttcacaaagtagtttctgagaatgcttctgtctagtttttttgtgatgatatttccttttttaccataggcctcaaagctatccaaatatccatttgcagatactacaaaaagactgtttccaaactgctcaattgaaagaaagtttattgtatgtgttgaacgcacacattagaaagaagttagtcagaaattttctgtctagtttttaggtggagatatctcctatttcaccataagcctcaatgggctcacaaacatccctttgcagattctacaaaacgagtgtttccaaactgctaaatcaaaagaaacgttcaactctgtgagatgaatgcacaaatcacaaagaagtttctcagaatgcttctgtctagtttttatgtgaagatatttctttttcaccctaggcctcaaacggcatacaaatatccatttgcagattatacaaagactgtctccaaactgctcaatcaaaagaaaagttcaactctgtgagatgaaggaacacatcacaaaggagtttctcagaatgtttctgtctagtttttatgtgaatatatttcctatttccccataggcctcaatgggctttcaaatacacctcagcagtttctacaaaacgactgcttccaagctgctcaatcaaaggaaagtttcaactctgtgaaatgaaagcacacatcagaaaggagtttcttgtaaagcttctgtcttttttttgtgtataggtatttcctatttccccagaggcctcaatgggttcacaaacatccttctgtagattataaaaaacgactgtttccaaactgctcaatcaaaagaaatgttcaactctttgagatgaatgcacacatcaaaaagaagtttctcagaatgcttctatctagtttttatgtgaacatatttccttctctaaaatagtcctgaaagtgctccaaatatccacttgcagattataaaaaaagagtgtttccaaactgctcaatcaaaaaaaatttcaactctgtgagatgaatgcacacatcaaaaagaagtttctcagaatgcttctgtctagtctttttgtgaagatatttccttttccaccgcaggcctcaaagcactccaaatatccatttacagattctccaaaaagagtgtttcacaaattagtttctcagaaaccttctgtctagtttttatgtgaatatatttcctatttccccattggccataaatggctcacaaatatccctgtgcagattctgtgaaaagactgtttcctaactgctcaatcaaaagaaagtttcaacactctgagatgaatgcacacattccaaagtagttcctcagaaacctattgtttagtttttatatgaagatattgtctttttcactgtaggcttcaaagcactccaaatatacctttgcagattctacaaaagtactgtttctaaactgttcaaacaaaagaaagaatcaactctgtgagatgactgcacacatcacaaagtagtttctcagaatgcttctgtccagtttttatgtgaagatatttcctttttcgcaattggcctcaaagcattccaaatatccatttgctaattctacaaaaagactatttccaaagtgctcaatcaaaagaaaagttcaactctgagatgaaagcataccttacaaagcagattctgagaaagcttctgtctcgtttttatgtgaagatattttctatttaaccataggccaaaatgtgctcacaaatatccctttgcacattatacaaaaaggctgtttccagactgctcaattgaaagaaaggttcaaatcactgagatgaacacacacattacaaaaaagttcatcagaatgcttctgtctacttttaatgtgaagatatttctttatcaccataggcatcaaatggctcggatatatccctttgcagagtgttcaaaaagactgttttgacactgctcaattgaaagaaaagttcaactctgtgagatgaatgcacacatcctaaagaattttctcagaaagcttctgtctagtttttatgtgaaggtatttcctatttcaccataggccataaatggctcaaaaaaatcactgtgcagattctacgagaagactgtttccaaactgctcagtcaaaataaatgttcacctctttgggatgaatgcacacatcccaagaagtttcgcagaatacttctgtctagattttatatgtagatatttccttttatgccataggagccaaagcactccaaatatccatttgcagattctacaaaaagactgtttccaaacgaaacgggtgaatcaaaagaaatgttcaactctgtgagatgaaagcatacattaaaaagaagcttctcagaaaacttctttctcgtttttatgtgaagatattacctatttcaccatatgccataatgggcttacaaatatccctgtgcagattctatgaaaagaatgtttccaaagtgctcaatcaaaagaaaatttcaaatctgtgacatgaatgcacacatcacaaataagtttcccagaaagcttctatttagtttttatgtgaagatatttcctttttcaccaaaggcctcaaagcgctccaaatatccatttgcagattctacaaaaagggtatttccaacctgctcaattgaaagaaaggttcaactctgtgagatgaatggatacatttcaaagaagagtctcagaaagcttctgtctagtttttatgtgaagatatttcctatttcaccttagggcataaagggctctcaaatatccctgtgcagattctatgaaaaaactgtttccaaattgctgaatcaagagaaagtttaaactctgtgagatgagtacacacatcacaaagatccttctcagaaaccttctgtttaatttttatgggaagatatttcctttttcaccataggcctttaaccggtcacaaatatccctctacagatactacaaaaagactgtttccaaagtgctccatcaaaagaaaggttcaattctgtgagatgaatacaggcatcacaaagaagtttctcagaatgcttctgtctagtttttatgtgaagatattttctatttcacaataggccataagggactctcaaatgtccctgtggagattctacaaaaagactgtttccaaactgctcaatcaaaagaaaagttcaactttgtgagatgaatgcacacatcacaaagaagtttctcataatgtttctgcctagttttcatgtgaagatatttccttttccaccataggcttcaaagcgttccaattaaccacttgcagattctacaaaaagtgtgtttccaaactgctcaatcagaagaaagtttcaactctgtgagatgaatacacatatcacaaagaagttcctcagaatgcttctgtcttgtttatatgtatagctatttctttttcaccatagccctcaaatggctcggaaatatccatctgcagattgtacaagcaggctgtttgcaaagtgctcaatcaaaggaaagtttcaattctgtgagatgaatgcaggcatcacatgtaagtttcttagaaagcttctgttcagtttttatgtgaagatgttttctttttcactataggcctcaaagcactccaaatatccatttgtggattctacaaaaagagtgcttccaaactgttcattcaaaagaagcgttcaactctgtgagatgaaaacatacatcacaaagaagattctcagaaagcttctgtttagtttttatgtgaagatatttcccttttcccaataggccttaaagtgctccatatatccatttgcagattctacaaaaagactgtttccaaactgctcaatcaaaagaaaggttcaactctgtgagacgaaagcatacattaaaaagaagtttctcagaaagtttctgtctcaattttatgtgaagatattatgtatttcaccatagaccataaagggatcacaaatatccctgtgcagattctaagaaaagactgtttccaaactgctcaatcaaaacaaagtttcaactctgtgaaatgaaatgatacatcacaaagaagtttctaagaaagcttctgtctagtttttatgtgaagatatttcctatttcaccttaggatataaagggctcacaaatatccctgtggagattctacaaaaagactatttccaaactgctcaatcaaaaaaaggtaactttgtgagatgaatacacacatcacaaagaattttctcagaatgcgtctgtctagtttttatgtgaagataattccttttccaccataggcctcaaagcactccaaatatccatttgcagattccacaaaaagactgtttacagtggggtgttaaagtctgccattattattgtttgggagtctaagtctctttgtaggtctctaaggacttgctttatgaatctgcgttctcctgtattggatgcatatatatttaagatagttagatcttcttgttgctttgatccctttaccattatgtaatggctttctttgtctagtttgatctttgttgatttaaagtctgttttatcagagactaggtttgcaacccctgccttttttgttttccatttgtttggtagatcttcctccatccctttattttgagcctatgtgtgtctctgcacctgagatgggtttcctgaatacagcacactgatgggccttgactctttatgcaatttgccagtctgtgtcttttaattggaacatttagcccatttacctttaaagttaatattgttgtgtgtgaatttgatcctgtcattatgatgttagctgttattttgctcgttagttgatgcagtttctccctagcctcgatggccttacaatttggcatgtttttgtagtggctggtaccagtttttcctttccatgtttagtgcttctttcaggagctgttttaaggcatgcctggttttcacaaaatctctcaacatttgcttgtctgtaaagtattttatttttctttcacttttgaagcttagtttggctggatatgaaattctgggttgaaaattcttttctttaagtatgttgaatattggtccccactctcttctggcttgtagagtttctgctgagagacctgctgttagtctgatgggcttccctttgtgggtaacccgagctttctctctggctgcccttaacattttttccttcatttcaactttagtgaatctgacaattatgtgtcttggagttgctcttcttgaggagtctctttggggcattctctgtatttcctgaatttgaatgttggcccgccttgctagattggggaagttctcctggaaaatagcctgcagagtgttttccaacttggttccattctccctgtcactttcagatacaccaatcagacgtagatttggtcttttcacatagtcccatatctcctggaggctttgttcatttcttttttttcttttttctctaaacttcttttcttgcttcatttcattcatttcatcttccatcacagataccctttcttccacttgatcacaatggctactgaggcttctgcatttgtcatgtagctcccatgccttggttttcagctccatcaggtcctttaaggatttctctgcattgtttattctagttatccattcgtctaatttttttacaaagcttttaacttctttgtcattggttcgaatttcctcatgtagctcggagtagtttgatcatctgaagccttcttctctcaactcgtcaaaatcattctccatccagctttgttccattgctggtgaggatctgcgttcctttggaggacaagagacactctgatttttagagtttccagtttttctgctcacttttttcacatctttgtggttttgtctacctttggtctctcatgatggtgatgtacatatgggattttggtgtgcatgtccttgttgtttgttagttttccttctaacaaacaggaccctcggctgcaggtctgttggaatttactagaggtccactgcagaccctgtttgcctgggtatcagcagcggatttgcctgggtatcacacataaaaaagaagttactcagaatgcttctacctagtttttatgtgaagatacttctttttcaccataggactcaaatggttcagaaatatccctttgcagattctacaaaaagtctttttccaaactgctcaatgaaaagaaaggttcaactctgtgagatgaatgcacacatgaaaaagaagtttctcaggatgcttctatctagtttttatgtgaagatatttttttttcaccataggcctcaaatagctcagaaatatccatttgcagattgtacaaaaatactttttccaaactgctcactgaaaagaaagattcaactctgtgagatgaatgcaaatatcacaaagaggtttctcaaaaaacttctgtctagtttttatgtgaagatatttcctttttaaccataggcatcaaaccactcacaaatatccctttgcagattacacaaaaagactgtttccaaactgctcaatgaaaagaaaggttcaaccctgtgagaagaatgcacacatgaaaaagaagtttctcagaacgcttctgtctagtttttatgtgaagatatttctttttcaccataggcctcaatctactcagaaatattcctttgcaggttacacaaaagactgtttacaaactgctcaatgaaaagaaacgttcaacactgtgagaagaacacacacataaaaaaaagtttctcagattgcttctgtctggtttttatgtgaaaatatttccttttttaccataggtctcaatccgctcagaaatatccatttgcagattgtacaaaaatactgtttccaaactgctcactgaaaagaaagggtcaactctgtgagatgaatgcaaacatcacaaaggggtttctcaaagagcttctgtctagtttttatgtgaagatatttcctatctcaccataggccataaatggctctgaaatataactttccacattccacaaaaggactgtttctaaactgctcaatcagaagaaaggttcaactctgtgagacaaatggacacatcacaaagaagattcccagagagtttctgtctagtttttatgtgaagatatttcttttcaaccatcagcctcaaatggctcagaaatatccctttgcagattataaaaaaaaaaaaaaaactgcttccaaactgcttaatcaaaagaaagtttcatccctgtgagatgaatgaccacatcaaaaagaagtttctcagaatgattctgtttagtttttatatgaagatatttcattttcaccatattcctcaaagggctccaaatatccattagcagactctacaaaaagagtgtttccaaactcctcaatcaaaataaagttttaactctgtaagatgaaagcacacatcacaaagaagtttctcagaaagtttctgactactttttatgtgaaaatattacctatttcacaataggactcaatggtttcacaaatatccctttgcagatactaaaaaggactgtttccacaatgctcaaccaaaagaaagtttcaactttgtgagatgaaagcacatatcacaaagaggtttctcaaaatactgctgtctagtttttatgtgaagatatttcctttttcaccataggccttgaaccactcagaaacattcctctgcagatactacaaaaagactgtttccaaactgctacatcaatagaaagtttcaattctgtgagatgaatgcacacaacacaaagaagtttcccagaatacttctgtctagtttctttgtgaagatatttcttttttatcatagcctcaaaatgctccaaatatccatttggagattattcaaaaagtctgtttcaaaactgctcaattaaaggaaacactcaactctgtgagatgaaagcatgcatcacaggaagtttctcagaaagcttctgtctactttttatgtgaacatatttcctatttcaacataggccaaaaagggctcacaaatatccctttgcagattctacaaaaggactgtttccaaactgttcaataaaaagaaactttcaaccctgtgagatgaatgcagacatcacaatgaagtttctcagaatgcttctgtctagtttttatgtgaagatatttcctttttcaacataagcctcaaaatactcacacatatccctatgcagatactacaaaaagactgtttccaaactgctccatcaaaagaaaggttgaactctgttagatgtatgcacacagcacaaagaagtttctcagaatgcttttgcctagtttttatgtgaagatatttcccttttcaccataggcatcaaagcattccaaatattgatttgcagattctacaaaaagactgtttccaaactgctcaatcaaaagaaaagttcaactctgggagttgaatgcacacatcacaaagaagtttctgggaaatattctgtttaggtttatgtgaagatattacctttttgaccataggctggaaagcgctccaaatatccatttgcagattctacaaaaatggtgtttccaaactgctctatcaaaagaaaggttcaactctgtgagatgaatgcacacatcacaaagtagtttatcagaatgcttctgtctagtttttatgtgaagatattgtctttttcaccataggccacaaaacacaccaaatatcaatttgcagattctacaaaaagactgtttccaaactgctcaatcaaaagaaagtttcaactacgggagatgaatgcacacatcacaaagaagtttctcagaaagcttccttttagtttttatgttaaggtatttcctgtttcaccacaggacataaagggctcacaaatatcccttttctggttctacgaaaacactgttaccaaactgctcaatcaaaagaaaggttcaacactgtgagatgaatggacacattacaaagaaatttctcagaaggtttctctctagtttttatatgaagatacttgtttttcacaataggtctcaaaaggctcagaaatatccctttgcaaattgtacaaaaacactgtttccaaactgctctatcaaaagaaagattcaactctgggagaagaatgcaaatgtcacaaagaagtttctcaaaaagcttccattttgcttttagtgaagatatttcctttttcatcataggcctcaaagcgctgcaaatacccatttgaagattctacaaaaagagtgtttccaaactgctcaaacaaaagaaaggttcaactgtgagatgaatgcacacaaaacaaagaagtttctcagaatgcttctgtctagtttttatgtgaagatatttccattttcacaattgtcctgaaagcactccaaatatccatttgcagattctacgaaaatactgtttccaaactgctcaagcaaaagagaggttgaactttgtgagatgaaagcacacagcacaaagaagtttctcagaatgcttctctctagattttatgtgaagatacttctttttcaacacaggcctcaaacgactcagaattatccctttgcagattgtacaaaaagacagtttccaaactgcacaatcaaaagaaaggttcaactctgggagatgaatgcacacatcacaaagaagtttctcacaaagcttctgtttattttttacctgaagatatttcctttttcaccatatacctcaaagcactccaaatatccatttctgtattctacaaaaagaaagtttccaaactgctcaatcaaaagaaaggttcaactctgtgagataaatgcacacatcacaatgaattttctcagaatgtttctgtctagtttttgtgtaaagatatttcatttttatccataggtcttaaatcagtcacaaatatccctttacagatactacaaaaagaatgcttccaacctgctgtatgaaaagaaaggttcaactctgtcacatgagtgaaaccattacaaaggtgtttctcagaataattccgtctagtgtttatgtgatgatatttcatttatcaacacaggccttaaaccacccaaaaatattcctcttcagatactacaaaaggactgtttccaaattgctccaccaaaagaaaggttcaactctgtgagatgaatgcacacatcacaaagaagtttctcagaatgcttctgtctaatttttatgtgaagatatttcctttttcaccgtagacaacaaatcgctccaaatatcaatttgtagattctacaaaaaggctgtttccacactgctcaataaaaagaaaggttcaactctgggagatgaatgcacacatcacaaggaagattctcagaaagcttctgtttagattttttgtgataatagtttctttttcaccacaggcctcaaagcactccaaatatctatttgcaaattctacaaaaagagaatttccaagttgttcaatcaaaagaaaggttcaactctttgagacaaatgcacacataacaaagaagtttctcagaatgattctgtctagcttttatgtgaagatatttcctttttcaccgtagaccttagacagctcaaaaatatccctctgcagatactacaaaaagactgtttccaaactgttccatcaaaacaaggttcaactctgtaagatgaatgcacacatcacaaagaagtttctcagaatgcttctgcctagttttgatgtgaagatatttcctttttcaactttgccctcaaagtgccccaaatatccatttgcagatgctacaaaaagacagtttccaaacttttcaaaaaaagaaacgttcaactctgtgagatgaaagcatacatcacaaagaagtttcttagaaaacttctgtctagtttttatgtgaagatatttcctatttcaccataggtcataaagggctcacaaatatcactttgcaggttctacgagaacactttttccaaactgctcaatcaaaatagagcttcaactctgtgacatgaatgcacacatcacaaagaattttctcagaatgcttctgtctagtttttatgtgaagatatttcctttttcaccatagacactaaagcattcacaaatatccctctgtatactctacaaaaagactgtttctaaaattatccttcaaaagaaagttgaactctgagatgaatgcacacttcacaaaggaatttctcagaatgcttatgtctagtttttatgtgaagatattccctttttcacgatagtcctcaaagcattacaaatattcatttgaagattctacaaaaagacagtttccaaatttctcaatcaaaagaaagtttcaactctgtgagatgaaaacacacatcacaaagaagtttctcagaaagcttctgtctagtttttatgtgaacatatttcctatttcaccataggcctcaatgggctcacaaatatccctttgcagattctacaaaagcactgtttccaaacttgtcaataaaaagaaaggtttgactctgtgaggtgaattcacacatcacaaagaagtttctcagaatgcttctgtatagtttttatgtgaagatatttcctttttcacagtaggcctcaaagcgcttcaaatatccactcgcagattctacacaaagactgtttccacactgctcaatcaaaggaagtttcaactctgtgtaatgaatgcacatatcacaaagaaatttctcagaaaacttctgtttagtttttacatgaagttatttcctttttttccatagacctcaaagcactccaaatatccatttgcagattctacagaaagagtgtttccaaactgctcaatcaaaagaatgtttcaactctgtgagatgaaagcatgcattacaaagaactttctcagaaagcttctgtttagttttcttgtgaagatatttcctatttcacaatcacctcaatgagctcacaaatatcccattgcagattctacaaaaggactgttttgaaactgttcaaacaaaagaaaggttcaattctgtgaaatgaatgcacacatcacaaagaactttttcagaatgattctgtctagtttttatgtgaagatatttcctttttcatcatattcctcaaagcactccaaatatccatttgcagattctaccaaaagactatttccaactgctcaagaaaaagaagggttcaaccctgtgagatgaatgcacacatcacaaagatgtctttcagaatgcttctgtctagtttttatgggaaaatatttcctatttcaccataggcaataaaaggctcaaatatatcactttgcagattctacaaaaagactgtttccaaactgctcagacaaaagaaagtttcaactctgtgagataaatggacacatcacaaagaagttcctcagaatgcttctctcgagtttttctgtgaaggtattactttttcaccataggcctcaaacagctctgaaatatcccttgcagattgtaggaaaagacagtttccaaactgctcaatgaaaagaaagcttcaatactgtgagatgaatgcacccatcacaaagaagtttctcacaaagcttctgtctagtttttatgtgaagatatttcctatttcacaataggcctcaatcagctcacaaatatcccttttgcagatactacaaaagcactgtttccaaactgttccaacaaaactaatgttcaactctgtgaaatgaatgcacacatcaaaaagaagtttctcagactgcttctgtgtacttactatgtgaaggtatttcctttttcaccatagacctcaaagctctccaaatatccattttcagattctacctaaagactgtttccaaactgctcaaacaaaagaaaggttcaactatcagaaatgaatggacacaacacaaagaagtttctcagaatgcttctgtctaatttttatgtgaaatatttcctatttcaccatatgccataaagggctcaaaaatatctctttgcagaatgtacaaaaagacagtttccaaactgctcaaagaaaacaaaggttcaaatctgtgagatcaatggatacatcacaaacaagtttctcagaatgcttctgtctagtttttatgtgaacacattacttttccaccataggcctcaagcagctcacaaatattcccttacagattgtacaaaaagagtgtttccaaactgctcaatcaatagaaactttcaactctgtgagatgaaagcatacatcacagagatgtttctcagaaagcttctgtctagtttttgtgtgaagatatttcctatttcaccatacgccatcaatggatcacagatatcccattccagattctgcaagaggacactttccaaactgttcaatcaaaagaaaggtgcaactctgtgagatgactgcacacatcacaaataagtttctcagaatgcttctgtctagattttatgcgaggacatttgctgtgtcaccataggcctcaaagtgatccaaatatccatttgcagatactacataaacactgtttgcaagctgctcaatcaaaagaaaggttgaactctgtgagatgaaagcatacatctcaaagaagtttcccacaaaccttctgtgtcgtttttatgtggagatatttcatattgcacaataggccataaacggctcacaaatatccttttgcagattgtacaaaaagactgtttccaaactgctcaatcaaaagaaaagttcaacgtgtgagacgaatgtgcacatcacaaaggagtttctcagaatgcttctgtctagtttttatgtgaagatatttccttcttcaccacaggcctcaaagtgctccaaatattcatttgcagattctacaaagagactctttccaaactgctcaatcaaaagaaagattgatctctttgagatgaaagcacacatcacaaaaagtttcacagaaaacttctgtctagtttttatgtgataatatttcctatttcatgatatgcttccatgtgctcacaaatatcccttttcagattctacaaaaggactgtttccaaactgttcaatcaaaaaaaaggttcaactctgagagatgaatgcacacatcacaaagaagtttctcataaagcctctgtttagtttttatgtgaatatatttcctttttcaccatctgcctcaatgtgctgcaaatatccatttgcagattctacaaaaagagtgtttccaaactgctccatcaaaaaaaaggttcaattccatgagatgaatgcacccatcacaaaggagtttctcaaaatgcctctgtctaattttttttttttgatgatatttcattttccactataggtctcaaagtgctgcaaatatccatttgcagattctacaaaacaactgtttccaaactgctctatcataattaaggttcaactctgggagaggaaatcacacataacaaagaagttcctcagaaacttctgtctagtttttgtgtgaagatatttcctatttcaccataggccacaaagggctcaaaagtatccctttgcagattctgcaaaaggactcgttcaaaacagcccactcaaaggaaagtttcatctgtgtgagatgaatacacagatgacaaagtagtttcttagaatgcttctgtctagtttttatgtgaagatatttcctttttcatcataggccttaaaccactcacaaatatacctctgcagatactacaaaacgactgtttgccaactactcaatcaaaggaaaggtgcatctctgtgagatgaatgcacacatcacagagaagcttatcagaatgcttctgtctaatttttatgtgaagatatttcctttttcaccataggcctcaatgtgctctaaatatccatttgtagaccacacaaaaagacggtttccaaactgctcaatcaaaagaaagtttcaactctggtagatgaaatcatatatgacaaagaagtttctcagaaagcttctgtctagtttttgaatggagatatttcctatttcaccaaaggacagaaatggctcaaaaatatacattttcagattctacaaaaggactctttacaaactgctccatcaaaagaaagtttcaattctgtgagatgaatacaccgattacaaaaagattctcagaatgcttctgtctagtttttatgtgaagatattttctttttcaccataggcattacattgctcacaaatatccctctgcagctactacaaaaagaccgtttccaaaatgctcattcaaaagaaaggttcaactctgtgacatgaaagggcacatcactatgaagtttctcagaatgcttctctctagtttttaaatgaaggtacttctttttcaccataggcccaaatgggctcacaaatatccctttacagattgtagaaaaggactgcttccaaactgatcaaatgaaagaaagtttcaactctgtgagatgaatgcaaacatcacaaagaagttcctcagaatgcttctgcctagtttttatgtgaagatatttcctttttcaccataggcctcaaagtgcttcaaatatccatttgcagattctaccaaaagactgtttccaaactgctcaaacaaaagagagattcaactatcagaaatgaatggacacaacacaaagaagtttctcagaatgcctcggtgcactttttatgtgaaaatacttatttttcaccacagacctcaaatgtctcggaaacatcccttgcagatcgtacaaaaagactgtttccaaactgctcaatcaaaagtaggtttcaaatctgtgaggtgaatgcacccatcacaaagaagtttctcagaaaacttctcttattttttctgtgaagatatttcctttttcaccacaggcctccaagcactccaaatatccatatgcagattatacaaaaagaatgtttccaaactgctccatcaaaaaaaggttcaactctgtgagatgaatgcacacatcatagaggagtttgttagaattcttctgtctagtttttatgtgatgatatttcctttttcaccataggcctaaactgctcacaaatatccctctgcagataatatgaaaagactgtttccaaactgctccatcaaaagaaagcttcaactttgtgagaggaatgcacacaacaaaaagcagtttctcagaatgcttctgtctagattttatgtcaagatatttcctttttctccataggcctgaaagtgctccaaatattcatttgtagattctacaaaaagactgtttctaaactgctcaatcaaagaaaggttcaactctgtgggatgaaagcacacatcacaaattagtttctcagaaagcttctgtctaggttttatgtaaagatatttcctatttagcataggccacaatgggctcacaaatatccctctgcagattcttctaatggactgtttccaaactgttcaagaaaaaaaagcggtgttgccaaactgctccaaaaaacgaaatgttcaactctgtgaggtaaatgcacacatcacaaagaagtttctcagaatgcttcagtctagtttttatgtgaagatacttccttttggaccataggcctcaaagctctccaaatgtccatttggagatcctacaaaaacactgcttccaaactgctcaatgaaaagtaacgttcaactccgtgggaagaaagcatacatcacaaagtttctcagaaagtttctgtctagttttggagtgaacatatttcctatttcatcgtaggccataaagggctcacaaatatccctctgcaaattctacgaaaggactctctccaaactgctcaatcaaaagaaaggctcaactctgtgagatgaatgcaaatatcacaaaaaaattctcagaatgcttctgtctagtttttatgtgaaggtatttcctttttcaccatagtcctcaaagtgctccaagtatagatttgtagattctacaaaaagattttgtcgaaactactcaatcaaaagaaaggttgaacactgggagatgaatgcacaaatcacaaaggagtttctcagaatgcttctgtctagtttttatgtgaagatatttcctttttcatcataggccttaaaccggtcacaattatccctatgcagatactacaagaagactgtttccaagctgctccatcaaaagaaaagttcaactctgagaaatgaatgcacacatcacaaagaagtttctcagaatgcttctgtctagttactatgtgaagatatttcctttttcaccataggtctcaaaacgctccaaatacccatttgcagattctacaaaaagactatttctaaactgcacaatcatcagaaaggttcaagtctatgagatggaaacatacatcagatagaagtttctcagtaagcttctgtctagtttttatgtgaagatatttcccttttcaccataggccttaaactgctcacaaatatccctctgcacatactacaaagagactctttccaaacttctccatcaaaggaaaggttcaactctgtgagatgattgcaaacatcacaaaagattttgtcagaattcttctgtctagttttaatgtgaagatgtttcctttttcaccttcagcctcaaagcgctccaaatatccagttgcatattctacaaaaatgctttttccaaactgctcaatccaaagaatggttcaatgccatgaaatgaaagcacacatcacaaagtagtttgtcagaaagcttctgtctggtttttattgaagatatttcctgtttcaccataggcttcaatgggcataaaaatatccctttgcagattttacaaaaggactgtttccaaacagttcaaacaaaagagaggttcaactctgtgagatgcaatcacacatcacaaaaaagtttgtcaaaatgcttctgtctactttttatgttgatatatttcctttttcatcataggacataaagggctgaaaaatatccctttgcagattgtacaaaaagactgtttccaaactgatgaatcaaaagaaaggttcaacactttgagatgaatggacacaacacaaataagtttctcataatgcttctgtataatttttatgtgaagatacttctttttcaccgtaggcctcaaacagcttggaattatccatttgcagattgtacaaaaagactgattccaaactgttcaatcaaaaggaacgttcaaatctgtgagaggaatgcacacatcacaaagaagtttctcagaaagcttctgtttagtttttatgtggagatatttcctttttcactataggccttgaagcactacaaatatccatttgtagagtctacaaaagagtttttccaaactgctccatcaaaagaaaggttgaactgtgagagatgaagcatacagaacaaagaagtttctcagaaatattctgtctagtttttatgtgaagatatttcctatttcaccataggccataaagttctcacaaatatccctttgcagattctacaaaaacagtgtttccaaactgttcaatcaaagaaaggttcaaccctctgagacgaatgcaggcatcacaaagaagtttctcagaattcttctctctagttgttatgtgaagatattttctttttcaccataggcctcatagcattccaaatgcccatttgcaaattctacaaaaagactgtttccaaactgctcaataaaaacaaacgttcatctctgtgagatgaaatcatacatcacaaagaagtttctcagtgaacttctgtctagtttttatgtgaagatatttcctttttcaccatagtacttaaactgctcacaaatatccctctgcagaaacttcaaaaagactctttccaaactgctccatcaaaggaaaggttcgtctctgtgagatgaatgcacacagagcaaagaagtttctaagaatgcttctgtctagtttttatgtgaagatacttcatttttcaccataggccctaactgctcacaaatatcgctctgcagttactacaaaaagactccttccaacgtgcaccatcaaaagaaacgttcagctctgtgagatgcatgcacacatcacaaaggagtttctcaaaatgcctttgtctagtttttatgtgtagatatttccttttcaacataggcctcaaagtgctccaaatatccacttgcagattctacaaatagacggtttccaaactgctcaatcaaaagaaaggttcaactctgtgagatgaatgcaaacatcaaaaagaaggttctcagaaagcttctgtctgcttttatgtgaagatatttcctatttcatcataggccataaagggctcacaaatatccctttacagatcctacgaaaagactgtttacaaaatgctcaatcaaaagaaagtttcaactctgtgagatgaatggacacatccaaaagaagtttctcagaatgcttctgtctagtttttatgtgaggatgtttctttttcaccataggcctaaaacagctcagaaatatccctttgcagattctacaagaagactgtttcgaatctgctccatcaaaagaagggctcaactctttgagatgaatgcaggcatcacaaagaagtttctcagaatgcttccatctggttttatgtgaagatatttcctttttcaccgtatacctcaaagggctccaagtatccatttgtagattccacaaaaatgctttttccaaactgctcaatcaaaagaaaggttcaactctgagagacgaaagcatacatcataaagaagtttctcagaaagcttctgtctagtttttatttgaagatatttcctattccacagtaggccatacagggctcaaaaatatccctttgcagattctatgaaaagactgtttcaaaattgctcaatcaaaagaaagtttcaaatctgggagatgaatggacacattacaaagaagttttttagaatacttctgtctagtttttatgtgaagaaatttcctttttcaccataggcctcaaagtgctccaaatatgcatttgtagattctacaaaaaactgaattcttttttttttttgatttggaaatactactttattcctttataatcaatatatatatcttaatactttctgtgtgtcagataatacactgggtcctgaggaaaacaaggtataaaaataatttttctcatacttgagaagatttcagtctagcggggaatgattgagaggagtcatttcccaaaaagactgatttctaaatgctccatgaaaagagaggatcaactctgtgagatgaaggcacacatcacaaagaacttactcagagtgtttccgtttagtttttatgtgaagatgttccctatttcaccataggcattaaactgcgcacaaatatccctctgcagataatacaaaaggacgggttccaaactgctccatcaaaagaaatgttcaactctgtgagatgaatgcacacatcgcaaagtagtttctcagaaagcttctgcttagtttttatgtgaagatatttcctttttcacaataggccttaaaacgctcaaaatatccatttgcagattctacaaaaagactgtttccaaactgctcaatcaaaaagaggttcaactctgtgagatgaatgcaaacatcacaaagaactttctcagaaacatctgtctgcttttaagttgaagacatttcctatttcaccatagaccataaagggcttacaaatatccctttgcagattctacaaaaagaatttttccaaactgctcaatcagaagaaagtttcaacactgtgagatgaatggacatatcacaaagaattttctcagaaagcttctgtctagttttttatgtgaggatatttatttttaatcataggcctcaacagctcagaaatatcactttgcagattgtacaagaagactgtttcgaaactgctccatcaatagaaaggttcaacactttgagatgaatgcaggcatcacaaagaagtttctcaggatgcttctgtctagtttctatgtgaagatatttccttttttaccataggcctcaaagtgctataaatatccatttgcagattctacaaaaagactgtttccaaacttctcaatcaaaagaaggattcaaatgtctgagatgaaccaacacattataaagaagtttcaaagaatgcttctgtctagtatttatgtggagatattcgctttttcatcataggccttaaaccggacacaaatatccctctgcagatacttcaaaaagactcttttggaacttctccatcaaaagaaagtttcaactttgtgagatgaatgcacacatcaccaagaagtttctcagacagactcagtctagtttttatgcgaagatatttcctttttcaccatagtcctcaaagcgctccaaatatccatttgcagattctacaaaaagactgtttccaactgctcaatcaaaagaaagtttcaactctgtgagatgaaagcatacatcacaaagaaatttctcagaaatcttctgtcttctttttatgtgaagatatttcctatttcaccataggccataaagagctcaaaaatatccctgtgcagattctttgaaaacactgcttccaaatgctcaatcaaaagaaaggttcaactctgtgagatgaatgcacacatcacaaagaagtttctcagactccttctgtctagtttttatgtgaagacattctttattcaccataggcctcaaacagctcagaaatatccatttgcagattgtacaaaaagactgtttccaaactgcttaatcaaaagaaagtttcaactctgtgaaattaatgcaggtatcaaaaagaagtttctcagaatgcttcagtctaatttttatgtggagatatttcctttttcactataggcctcaaagtgcttcaaatatccatttgcagattctacaaaaaggctgtttccaaactgcttaatgaaaagacagtttcaagtctgtgagatgaatacacacatctctaagaagtttcttagaatgattctctctagcttttatgtgtagatattttctttttcaccataggccttaaatcggtcacaaatatcccccagcagatacttcaaaaagacgtttccaaactgctccatcaaaagaaatattcaaacctctgagatgaatgcacacatcacagtgaagtttatcagaatgcttctgtctaatttttaagtgaagatatattctttttcaccataggcctcaaaaccctccaaatatccacttgcagattatacaaaaagactgtttctaaacagctcaatcaaaaagaaggttcaactctgtgagatgaaagcatacatcacaaagaagttcctcagaaagctactgtctagttttgatgtgaagatattttctatttcaccataggccacaatgggctcacaagtatccctgttcagattctatgaaaagactgtttccaaactgctcaaacaaaggagagattcaactctgtgagacgaatgcacacatcacaaagaagtttctcagagttattctgcctagtttttatgtaaagatatttcctttatcaccataggcctcaaagcactccaaatatccatttgaagattctacaaaaagagtttttccaacctgctcaatcaaaagaaagattcaactctgcgagatgaaggcacatgtcacaaaaaagtttctcagaatgcttctgtccactttttatgtgaagatatttcctttttcatcattggcctcaaagcgctccaaatatccttttacagattctacaaaaagactgtttcctaactgctcaatcaaagcaaaggcttaactctgtgagatgaatgcactcatcacaaacaagcttctcagattgcttctgtctagttctgatatttagatattcctttttcaccatagggcacaaacggctcaaaaatatccatttgcagattgtacaaaaagactgtttccaaattgctcaatgaaaagaaaggttcaactctgtgaaatgcatgcaggtatcacaaagaagtttctcagagtgcttctgtctattttttatatgaagatatttccttttcaccatagacatcaaagccctccaaatatccatttgcagattctaaaaaaatactgctttcaaactgctcaatcaaaaggaagcttcaactctgtaagatgaatgcacacatcacaaagtttcccagaatgcttctgtctagtttttatcacaagatatttcctatgtaaatgtatgcctcaaagcgattcaaatatccatttgaagattctacaaaaagagtgtttccaacaagttcaatcaaaagaaaattcaactttgtgagatgaatgcacacatcacaaagaagtttctctaaacgcttctgtatagtttttatgtgaagatatttcctttttcaccatagaccttaaacacgtcacaaatatccctcagcagatactacaaaaagagtgtttccaaagtgctccatgaaaagaaagcttcaactctgtgagatgaaagcctacatcacaaagaagtttctcagaatgcttctgtctactttttatgtgaagatatctctttttcacaataggcctcaaacggttcagaaatatccctttgcagattgtacaaaaagactgtttccaaattgctcaatcaaaagaaagtttcaactctgtgtgatgaatgcaggtatcacaaagaagtttctcagaaaggttctgtctagtatttacgtgaagtgatttactatttcaccacaggccgtaaagggctcaaaagtatcccagtgcatattctacagaaagactgtttccaaagtgcttcatctaaagaaaggttcagcactgtgagatgaatacacacatcacaaagaagtttctctgaatgctattgtatagtatttatatgaagatatttcctttttcaccataggccacaatcctctccaaatgtcaatttgcagattctataaaaacagtgtttctaacctgctcaatcaaaagaatggttcaactctgtgagatgaatgcacacatcaccaagaagtttctcagaatgtttctgtctcgtttttatgtaaagatacttcctttttcaccaagggccttaaaccaatcacaaatatctctctgtagatactacaaaaagactgtttccaaagtcctccatcaaaagaaaatttcaactctgtgagacgaatgcacacatcatgaagaagtttctcagaatgcttctgtctagtttttatatgaatatacttcttttttcaccataggcctcaaagcactccaaatatccatttgcagactctacaaaaagagtgttttcaacgtgctcaatcaaaacaaaggttcatctcagtgagatgaatgcacacatcacaaagatgtttttcagaatggttctgtctagtatttatgtgaagatatttcctttatcaccgtaggccttaaaccggtcacaaatatccatctgcagataccacaaaaagactatttccaaagtgctccatgaaaagaaaggttcaatcctgtaacatgaatgaacacatcacaaagaagtttctcagaatgcttctgtctagtttttatgtgaagatacttctttttaaacattgtcctcaaaaggctcagaaatatccctttgcagattgtacgaaaagactgcctcaaaactgctcagtcagaagaaagtttcaactctgagatgaatgtaggcatcacaaagaagtttctcagaatgcttctgtctagtttctacatgaagatattacctatttcaccataggccaaaaagggctcacaaatatccctgttcaaattctacgtatacacggtttccaaactgctccatcagaagacacgttcaactctgtgagatgaatgcacacatcacaaagaagtttctcaggtgattctgtgttgtttttatgtgaagatattccatttttcaccagagacctcaaagtgttgcaaatatccatttgcagatgctacaaaaagagtgttaacaacctgctcaatcaaaagaaaggttcaactctgtgagctgaatgcacacatcaaaaagatatttctcagaatgcttctgtccagtttttatgtgaagatatttccattttcaccattggccttaaaccggtcactaatatcactctgcagatactactaaacgactgtttccaaactgttacatcaaaagaaaggttcaacactgtgaaacgaatgcactcatcacaaagaagtttctctgaatgcttctgtgtagtttttctgtgaagatatttcctttttcaccataggactcaaagcgttccaaatatccatttgcagatctacaaaaagacagtttccaaagtgctcaatcaaaagaaacgttcaactgtttgagatgaaagcatatatcacaaagaattttatcagaaaacttctatctagtttttatgtgaggatatttcctacttcaccataggccataaggggctcacaaatatccctgtgcagattctacgaaaagactgtttccaaactgctcaatgaaaagaaagtttcaactcagtgagatgaatgcacacagcacaaagaagtttctcagaatgcttctgtctagtttttatgtgaagatatttcctttttcaccacaagccctaaaccagtcacaaatatccccttgcagatactataaaaaggctgtttccaaagtgctccatgaaaagaaaagttcaactctgtgagatgaatgcaggcatcaaaagaagtttctcaaaatgcttctttccagttcttatctgaagatatttagtttttcaccatagtccttaaattgctcaaaatatccatttgcagaatctacaaaaagactgtttccaaactgctcaatcaaataaaagttcaactctgtgagatgaatacacccatcacaaagaagtttctcagaatgcttctgtctactctttatgtgatgataattcctttttcaccataggcctcaaagggctccaagtatccatttgcagcttctaaaaaaagagcatttccaactggctctatcaaaagaaagtttcagttctgtgagatgaatgcacacatcacagagcagtttctcagaatgcttctgtctagtttttatatgaagatatttcctttttcaccacaggccttaaaccgttcacaaacatcccactgcagataatacaaaaagactgtttcccaattgctccatgaaaacaaaaggttcaactctgtcagatgaatgcacacaccaaaaagaagtttcccagaatccttctgtctagtttttatgtgaagatatttccttgttcaccttaggcctcaaaccactccaaatatccatttgcagactctacaaaaagatgtttccaacctgctcaatcaaaagaaaggttctattctgtgagatgaaagcacacgtcacaaagaactttctcagaatacttctgtctagtttttatgtgaagatatttcctttttcaacataagtcttaagcctcgcacaaatatccctctacagatacttcacaagcactgtttggaaactgctccatcaaaataaattttcaactctgtgagatgagtgcacagatcacaaggaagttcctcagaatgcttctgtctagtttttattggaagttatttctttttcaccatatgcctcaaacagctcggaaatatccctttggataaggtttaaacagactgtttccaaattgctcaatcagaagagagcttcaactctgagatgaatgcaggcatccaaaagaagtttctcagaatgtttctttctagtttttatgtgaagatatttcctttttcaccataggcctcaaatcgctccaaatatccatttgcagtttctacaaaaagactgtttccaaactgctcaaccaaagaaaagttcaactcggtgagatgaatgctcacatcacaaataaatttctgacagtgcttctgccagaagcaaatcgatatttgctatttcaaaatagggtgtaaagggctcacaaatatatctgtgtagattttatgaaaaaactgtttccaaactgctcaatcaaaagattcaactctgtgaaatgaatgcagatatcacatagaagttcctcagaataattctgtctagtttttatgtgaagatatttcctttatcaccataggcctcaaagtgctccaaatatccctttgcagattctacaaaatgatggattccaaactgctctatcaaaagaacggtacaactctgtgagatgaatgcacacatcacaaagaagtctctcagaatgcttctgtctggtttttaagtgaagatatttcctttttcaccaaaggcttcaaagcgctccaaatatccatttgcagattctacaaaaagagtgtatccaacctgctcaataaaagaatggttcaactctgtgagatgaattcacacatcacaaagcagtttctcagaatgcttctgtctagtttttatgagaagatatttcctttttcacccgaggccttaaaccagtcacaaatatccctctgcagattctacaaaaagactctttctaaactgctccatcaaaagaagggttcaactcggtgagatgaatgcacacatcacaaagaagtttctcagaatggttctgtctaattcttctgtgaagatatttcctttttcaccacaggcctcaaagcgctctgaatatccatttccagattctacaaaaagactgtttccaaactgctcaatcaaaaggaatgttcaactctgtgagatggaagcaaacatcacaaggaagtttctcagaaagcttctgtctagcttttatgtgaaatacttcctatttcaccacaggctataaagggctgacaaatatccctgtgcagattctatgaaaagactgtttccaaactgctcaatcaaaagaaaggttcaacgctgtgaaatgaatgcaagcatcacaaagaagtttcccagaaagcttatgtttactttttatgtgaagatatttcctttttcaccataggacccacagcgctccaaatatacatttgcagattctacaaaaagacttttttcaaactgctcaatgaaaagaaagcttcaactctgtgagatgaatgcacaaatctcaaagcagcttctctcaatgcttctgtcaggtttttatgtgaatatatttcctttttctccataagccatagagggctcacatatatgctcttgcagattctaccaaaaaccatttccgaattgctcaatcaagaggatggctcaaccatttgagatgaatggactcatgacaaagaagtttctcagaatgcttctgtctagtagttatatgaagatatttctttttcaccataggcctcaaactgctcagaaatatccctttgcagattgtacaaaaagactgtttccaaagagtttaattaaaatgaatgttcaagactgtgagatgaatggacacaacacaaaaaagtttctcagaaaactcctgttcagtttttatgtgaaaatatttcgtttttcaccataggcctcaaatcgctccaaatatccttttgcggattctacaaaaagagtgtttccaaattgctcaaacaaaagaaacattcaactctgtgagatagaagctcgcatcacaaagaggtttctcagaaagattcagtttagtttttatatgaagatatttcctttttcaacataggaatcaatgggctcagaaatatcccttttcagattctacaaaaggactgtttccaaactgctcaatccaaagaaaggttcaactcttgagagatgaatacacacatcacagagaagtttctctgaatgcttctgtgtagtttttatgtgaggatatgtctttttcaccataggcctcaaacagctcacaaatatccctctgcagataccatgaaaagactgcttccaaactgctcaatcaaaagaaaggttcaactctgagcagtttttatgtatctcaggatacaaaatcaaggtacaaaaatcacaagcattcgtatgcaccaataacagacaaacagagagccaaatcatgagtgaactcccattcacaattgcttcaaaggtaataaaatactcaggaattcaacttacaagggacatgaaggacttcttcaaggagaacaacaaactactgctcaatgaaataaaagaggatacaaagaaatggaagaacattccatgctcatgggtaggaaggagcaatatcgtgaaaatggccatactgcccaaggtaatttatcgattcaatgacatccccattaagctgccaatgactttcatcacagaattggaaaaaagtactttaaagttcatatggaaccaataaagagcctgcattgccaagtcaatcctaagccaaaagaataaacctggaagaatcacgctacctgacttcaaactatactacaaggctactgtaaccaaaactgcatggtactggtaacaaaccagagatatagatcaatggaacagaacagagccctcagaaataacgccgcatatctaaaacaatctgatctttgacaaacctgagaaaaacaagcaatggggaaatgatcacctatttaataaatggtgctgggaaaactggctagccatgtggagaaagctgaagaaggatcacttccttacgcctaaaacaaaaattaattcaagatggattaaagtcttaaacattagacctaaaaccataaaaaccctagaagaaaacctaggctttaccattcaggacataggcatgggcaaggacttcatgtctaaaacaccaaaagcaatggcaacaaaagccaaaattgaccaacgggatctaattaaactaaagagcttctgcacagcaaaagaaactaccatcagagtgaacaggcaacctacaaaatgggagaaaagttttgcaacctactcatctgacaaagggctaatatccagaatctacaaagaactcaaacaaatttacaagaaaaaaacaaacaaccccatcaaaaagtgggtgaaagacatgaacggacacttctcaaaagaagacatttatgcagccaaaaaacacatgaaaaaatgctcaccatcactggccatcagagaaatgcaaatcaaaaccacaatgagataccatctcaaaccagtcagaatggtgatcattaaaaagtcaggaaacaacagatgctggagaggatgtggagaaataggaacacttttacactgttggagggactgtaaactagttcaaccattgtggaagtcagtgtggtgattcctcagggatctagaaccagaaataccatttgacccagccatcccattactgggtatatactgaaaggactataaatcacgctgctataaagaaacatgcgcacgtatgtttatagctgcactattcacaatagcaaagatttggaaccaaactaaatgtccaacaatgatagactgaattaagaaaatgtggcacatatacatcatagaatactatgcagccataaaaaatgatgacttcaggtcctttgtacggacatggatgaaattggaaatcatcattctcagtaaactatcgcaaggacaaaaaaacaaaaaccgcatattctcactcataggtgggaatggaaaaatgagaacaaatggacacaggaaggggaacatcacactctgggatggttgtggggtggggggaggggggatagcattaggagatatacctaatgctaaatgacgagttaatgggtgcagcacaccagcatggcacatgtatacatatgtaactaacctgcacattgtgcacatgtaccctaaaatttaagtatactaataataaaataaataaaaaagaagcattctgagaaaccactttgtgatgtgtgcattcatctcacagaactgaaactttcctttgattcagcagctttgaaacactctttttgtagaatctgcaagtggatatttggagcgctttgaggcctattgtggaaaaggaaatatcctcacacaaaaactacacataagcattctgagaaacttctttgtgatgtgtgcattcaattcacagtgttgaacctgtctttcgattcagcagttttgaaacactctttttgtaaaatctgtaagtggatattggagcactttgaggtctgtagtggaaaaggaaataccttcatccaaaaactacacagaagcattctgagaaacttctttgtgatatgtgcattcatctcacagaactgaaactttcctttgattcagcagctttgaaacactctttttgtagaatctgcaagtggatatttggagcgctttgaggcctattgtggaaaaggaaatatcttcacacaaaaactacacataagcattctgagaaacttctttgtgatgtgtgcattcaactcacagtgttgaacctgtcttttgattcagcagttttgaaacactctttttgtaaaatctgtaagtggatattggagcactttgaggtctgtagtggaaaaggaaataccttcatccaaaaactacacagaagcattctgagaaacttctttgtgatatgtgcattcatctcacagagttgaacctttcttttgattgagcagtttggaaacaccctttttatggaacctgcaagtggatatttggaacgctttgaggcctatggtggaaaaggaaatatcttcacatgaaaactagacagaaacattatgagaaacttctttgtgatgtgtgcattcatgtcacagagttgaacctaagttttgatagaccagttttgtaactctctttttgaataatctgccagtggatatttagagcccttagtggcctatggagaaaaggaaatatcttcacattgaaactacacagaagtattctgagaaacttctttgtgatgtgtgcattcaactcacagtgttgaacctatcttttgattcagcagctttgaaacactctttttgtagaatctgcaagtggatattggagctctttgaggcctatagtggaaaaggaaataccttcacccaaaaactacacagacgcattctgagaaacttctttgcgatatatgcattcatctcagagagttgaacctttcttttgattcagcagtttggaaacaccctttttatagcatctgccagtggatatttggggcactttgaggcctatggtggaaaaggaaatatcttcacataaaaactagacagaagaattatgagaaacttctttttgatgtgtgcattcaactcccagagttgaacctaagttttgatagaccagttttgaaactctctttttgaataatctgcaagtggatatttagagcccttagcagcctatggaaaaaaggaaatatcttcacattaaaactacacagaagcattctgagaaacttctttgtgatgtgtgcattcaactcacattgttgaacgtatctttttttttttattatacttgaagttttagggtacatgtgcacaatgtgcaggttagttacatatgtatacatgtgccatgctggtgtgctgcacccattgaatcgtcagttatcattaggaatatctcccaatgctatccctccctcctcaccacaccccacaactgtccccatagtgtgatgttccccttcctgtgtccatgtgttctcattgatcaattcccacctatgagagaatatgtggtgtttggttttttgttcttgtgatagtttactgagaatgatgatttccaatttcatccatgtccctataaaggacatgaactcataattttttatggctgcatatattccatggtgtatatgtgccacattttcttaatccagtctgattgttggacatttgtgttggttccaagtctttgctattgtgaatagggccacaataaatatacgtgtgcatgtgtctttatagaagcatgatttatagtcctttgggtatatacccagtaatggaatggctgggtcaaatggtatttctagttctagatccctgaggaatcgccatactgacttccacaatggttgaactagtttacagtccctccaacagtgtaaaagtgttcctattccttcacatcctctccagcacctgttgtttcctgactttttaatgattgccattctaactggcttgagatggtatctcattgtggttttgatttgcatttctctgatagccagttatggtgagcattttttcatgtatttttggctgcataaatgtctccttttgagaagtgtctgttcatgtcctttgctccctttttgatggggttgtttttttttttcctgtaaattttttgagttcattgtagattctggatattagccctttgtcaggtgctagattgtgaaacttttctcccattttgtaggctgtctgttcactctaatggtagtttcttttgctgtgcagaagctctttagtttaattagatcccttttgtcattttggcttttgttgccattgtttttggtgttttagagatgagttccttgcccatgcctatgtcctgaatggtaatgcttaggatttcttctagagttcttatggttttaagtctaacgtttaagtctttaatccgtcttgaattaatttttttataaagtgtaaggaaaggatccagtttcagctttctctgtatggctagccagttttcccagaaccatttattaaatagggaatcctatccccattgcttgtttttgtcaggtttgtcaaagatcagatggttgtaaatatacggcattacttctgagggctctgttctgttgcattgatctatatctctgttttggtaccagtagcatgctgttttagttactgtagccttgtagtatagattgaagtcaggtagcatgatgcctccagctttgttcttttggtataggactgacttggcgatgtggactcttttttggtgtcatatgaactttaaagtagttttttccaattctgtgaagaaaatcattggtatcttgatggggatggcattgaatctataagttacttggggggcagtatggcgattttcacgatattgatgcttcctacctgtgcagttttgaaactctcttttgtagcagctgcaagtggatagttggagccctttgaggcctatggcagaaaaggaaatatcttcacacaaaaactgcacaaaagcaatgtgagaaacttctttgtgatgtgtgcattcatctcacaaaggtgaacccttcttttgattgagcagtttagaaacacgctttttgtagaatctgcaagtggatatttggaatgctttgaggcttatggtggaaaagaaaatatcttcacataaaaactacacagaagcattctgagaaacttccttgtgatgtgtgccttcaactcacagagttgaagctatcttttcatagagcagttttgaaactccccttttgtagaatctgcaagtggatatttggagccatttgcagcttatggcgtaaaaggaaatgtcttcacataaaagctacacagaggcattctgataaacttctttctgatgtgtgcattcgtctcacaaagttgaaactttcatttgattaacagttttgaaacaatattttggtagaatttgcaagtggatatttggagcgatttaagtcctattgtggaaaaggaaatatcttcacataaaaactacaaggaaatattctgagaaacttctttgtgatgtgtgcattcaacaaacacagttcaaactttcttttgattgagcagttaggaaagactctttttgtagaatctgcaagtggatctttggagcgctttgtggcctactgtggaaaaggaaatatcttcacataaaaactacccagaagcattctgagaaacaaatttatgatgtgcgcattgaactcacagagttgaacctatcttttgattgagcagttttcagtctctctttctgtagaatctgcaagtggatatttggagcccttttcagcctattttggaaaaggaaatatcttcacataaaaactacacagaagccttctgagaaacttccttggtgtgtgtgcattcacctcacagagttgaagctatcttttcatagagcagttttgaaagtcccctttcgtagaatctgcaagtggatatttggagccatttgtggcttatggtgtaaaaggaaatgtcttcacataaaagctacacagaagcattctgataaacttctttgtgatgtgtgccttcatctcacagagatgaaagtttcatttgattaacagttttgagacaatcttttggtagaatttgcaagtggatatttggagcgatttaagtcctattgtggaaaaggaaatatcttcacttaaaaactacacggaagcattctgagaaacttctttgtgatgtatgcattcatcaaacacagttcaaactttcttttgattgagcagtttggaaagactctttttgcagaatctgcaagtggatatttggagcgctttgtggcgtattgtggaaaaggaaatatcttcacataaaaactacccagaagcattctgagaaacttctttatgatgtgtgcattcaactcacagagttgaacctatcttttgattgagcagttttgaaacactctttttatagaatctgcaagtggatatttgaagcgctttgagtcctattgtggaaaaggaaatatcttcacataaaaactacatagaagcattctcagaaacgtcattgtgatgtgtgtattcatctcacagagttgaaacattcttttgattgagcagtttggaaacagactttttgtagaatctgcaagttgatatttggagcgctttcaggattattgtggaaaaggtaatatcttcacataaaaactacatagaagcattctgagaaacttctttgtgatgtgtgcattcatctcagagagttaaaccatttttttcatagagcagtttagaaacactctttttgtagaatctgcaagtggatatttggagtgctttgaggcctattgtcaaaaaggaaatatcttcacataaaaactaaacagaggcattctgagaaacttgtttgtgatgtgtacattcatctcacagagttgaacgtttcttttgattgagcagttttgaaaccctctttttgtagaatctgcaagtggatatttggagtgctttgaggccttttgtggaaaaggacatatcttcacatagaaactacgcagaagcattgtgagaaaatactttgtgatgtgtgcattcaactcccagcgttgaacctatcttttgattgagcagttttgaatctcactttttgtagaatctgcatgtaaatttttggagccctttccggcctattttggaaaagggaataagttcacataaaaactatatagaagcattttgagaaacattattaggacgtgtgcattcatctcacagagttttacctatcttttgattgagcaattttgaaccacactttgtatagaatctgcaggtggatattttaagcactttgaggccaatcgtgggaaaggaaatatcttcacataaaaactacacagaagcattctgagaaacttctttgtgatatgtgcattcatctcacagagttgaacatttcttttgattgagctgttttgaaacaccctttttgtagaatatgcaagaggatatttggagcgctttgaggccaattctggtaaaggaaataccttcacataaaaactgctaagaagcattctgtgaaacttctttttgatgtgtgcattcaattcacgcagttgaacctaccttttgattgagtagttttgaaactctctttttgtagaatctgcaagtggatattaggagcacattgaggcctattatgaaaaaggaattatcttcacacaaatctacaaagaagcattctgacaaaatactttgtgatgtgtgcattcaacacaccgagttgaaaatttcttttgattgagcagttttgaaactctctttttgcagaatctgcaagtgaatatttggagacttttgcagcgtgtgctggaaaagtaaatatcttcacataagaattactcagaagcattctgataaacatttggtgatgtgtgcattcatctaatagtgttgaacatatcttttgattgagcagctttgaaactctttttttctagaaactgcaagtggatatttggagccctttgcggcctatggtgaaaaaggaaatatcttcaaataaaaactacacagaagcgttctgagaaacatctttgtgatgtgtgcattcatctcacagatttgaatatttcttttgattgaacagttttgaaacactctttttgtagaatctgcaagtggatatttggagagcattgcggcctctagtggaaaaggaaatatcttcatataaaaactacacagaggcattctgataatcttctatgtgatgtgtacagtcatgtcacagagatgaaactttctttcgattgagcagattggaaacactctttttgtagaatctgcaagtggatgtttggagagctttgaggcctcgtggaaaaggtaatatctttacgtaaaaactacacagatgccttctgatgaacttctttttgatgtatgccttcaactcatagaactgaacttatctgttgacagagcagttttgaaaaccattttttgtagaatctgaaagtggatatttggagtcctttgtggcctatagcggaaaaggaaataccatcacataaaactccacagaagaattctgtgaaacttctttttgatgtgtgcattcgtctcatagagttgaacctttctttcaattgagcagttatgaaacaatctttttctagaatctacaagtggatatttggagcgctttgaggccaatagttttaaaggaaatatcttcacataaaaactacacagaagcattctgaggaatttctttgtgatgtgtgcattcatctcacagagttgaaacttttttttttattgagcagttttgaaacactcttttcgtagaatctacaagtggatatttggagtgctttgaggtctattgtggaaaaggaaatttcttcaaataaaagctacatggaaggagtctgagaaacttctttgtgatgtgtgcattcatgtcgcaggatgaaagctttcttttgattgagcagtttggaaatactgtttttgtagaatctgcaagtggatatttggagcttttagaggcctacggtagaaaaggaaatatcttcctataataactacatagaaacattctgagaaacttttttgtgctgcgtgcattcatctcatagagttgaacatttcttttgattgagcagtttttgaaacactgtttttatagaatctgcaagtgcacacttgtggctatttgtggtctatggtggagaaaggatatatcttcacataaaaactgcacagaagcattctgagaaagttccttgtgatgtgtgcattcatctcaccgagttgaacctatgttttgatagagcagttttgaaacactctttttgtagaatctgtaagtgcatattttgagtgctttgaggcctatggtggaaaggaaatatcttcacataaaaactacacagaagcattctcaaaacttctttgtgatgtgtgcattaaactcacagatttgaacctatcttttaatagagcagttttgaaactctcttttgtacaatctgcaagtggatatttggagacctttgcggcctatgatagaaaagggaatgtcttcacataaaaactacccagcagcattctgagaaactactttatgatgagtgcattcgtctcacagagttgaacttttccttcgattgagcagttttgaatcactctttttgtagaatttgcaagaggatatttggagcgctttgagacctattgtggaatgggaaatatcttcatgtaaaaacttcccagaagcattctgagaaacgtctttgtgatgtgtgcattcatctcacagagttgaaagtttcttttgatgagcagtttggaaacagtctttttgtaccatctgcaaatggatatttggagccctttgaggcctatgttggaaaaggaaatgtcttcacataaaaactacacagaagcattctgagaaacttctttgtgatgtgtgcattcatttcagagagttgaacttttcttttgattgagcagttttgaaactctcttcttgtagaatctgcaagtgtatatttgaagcgctttgaagcatgtattggaaaaggaaatatcttcacataaaaactagatagaatcattctgagaaacttccctgtgatatgtgcattcatctcacagtgttgaaactttcttttgattgagcagtttggaaacagtgtttttgtagtatctgtaaatggatatttcaggtgcttagaggcctatattggaaaaggaaaaatcttcacaaaaaaactagacagaggcattctgagaaacttcattctgcgatgtgcttttttctcacagagttggactgttcttttgattgagcagttttgaaacactgtttttgtagaatctgcaagtgcatatttggagcacttggaggcctattgtggaaaaggaaatattttcttataaaaactagacagaagcattctgagaaacttctttgtgatgtgtgctttcagttcacagaggtgaaactttctcttgattgagcagtttggaagtagtctttttgtagcatctgcaaatgaatatttgaatcgctttgaggcctatgttagaaaaggaaatatcttcatgtaaaatctagacagtagcattctgagaaacttctttgtgatgtgtgcattaatttcagagagttgaacttttcttttgattgagcagttttgaaacactcttcttgtataatctgcaagtgtatatttggagcgctttgagccatgtagtggaaaaggaaatgtcttcacataaaaacttgacagaatcattctgagaaacttctttgtgatgtctgcattcaactcacagtgttgaaactttctttctattgaggagtttggaaacagtctctttttagtatcttcaaatggatatttcgagtgcttagaggcctatagaggaaaaggaaaaattttcacaaaaaaactagacacaggcattctgagaaacttcattgtgaggtgtgcattcatctcacagagtttgactgttcttttgattgagctgttttgaaacaatctttttgtagaatctgcaagtgcatatttggagtgctttgcagcctatggaggaaagctaatatcttcacctggaaactagacagaagccttctgggaaacttctttgtgatgtgtgcattcacctcacagagttgaacctttcttttgattgagcagttttgaaacactctttttgtagaatctgcatttggatatttgcagtgatttgaagcctacggtggaaaaagaaatgtcctcatataaaaactagacagaagctttctgagaaacttctttgtgatgtgtgcatgcacctcagagagttgaacctttcttttgattgagcagttttgaaacactctttttgtagaatctgcaattggatatttgcagtgatttgaagcctatggtggaaaaagaaatgtcttcatataaaaactagacagaagccttctgagaaacttctttgtgaggtgtgcattcaactcacagagttgaacctttcttttgattgagcagtttggaaaccgtctttttgtagtatatgcaaattgatattttgagcactttgaggcccatggtggaaaaagaaatatcttcacataaatactagacagaagccttctgagaaacttctttgtgatgtgtgcattcatctcacagagatgaacctttcttttgatagggcagttgtgaaacactcctttgtagaatctgcaagtggatatttggagcgctttgcggcccatagtggaaaaggaaatatcttaacataaaaccagacagaagcattctgagaaacttctttgtggtgtgcctttatctcactaagttgaacatttcttttgattgagcagttttgaaacagtctttttgtagtatctgtaaattgatatttcaagcgcttcaaggcctatggtggaaaagcatatatcttcatataaatactggacagaaggattctgagaaacttctttgtgatgtttgcattcatatcatagagttgaaccttacttttcactcaacagttttgaaacactctgtttgtagaatgtgcaggtggatatttggagcgctttgcagcctatagtggcaacgaaaatatcttcacataaaaactagacagaagcattctgacaaacttctctgtgatgtgtgcattcaactcacagaattgaacctttcttttggttaagcagtttagaagcagtcgttttgtggaatctgcaaagggatatttgtgagcccattgaggcctctggggaaataggaaatatcttctcattaaaactagacagaactttctgagaaactgctttgttatgtgtgttttcacctcaaaaggttaaacctttcttttgattgagcagttttgaaacagtctttttgtagaaactgcaaatagatatttggagccctttgaagcataaggtgaaaaaggaaatatcttcccataaaaactattcagaagcattctgagaaacttctttgtgacgtgtgcattcatctcacagagttgaacattacatctgattgagcaatttggaaacagtcgttttgtggaatctgcaaagggatatttgtgagcccattgaggtccctggggaaaaaggaaatatcttcacattaaaactagacagaaactttctgagaaacttctatgagatatgtgctttcaactcacagatttgaaacattcttttgattgagcagtttggaaatagtctttttgtagattctgcaaatggacatttggatgctttgaggcctatggtgaaaaaggaaataccttcccataaaaattaggcagaagcattctgacaaacttttatttgatgtgtgcactcatctcacagagttgaaactttcttttgtttgagcagttttgaaaaaatctttttgtagaatctgcaatttcatatttggagcactttgtggcctataatgggaaaggaaatatcttcacaaaaaaactagccagaagcattctgacaaactactttggatgtgtgcattcatctgagggaggtgaatctttcttttcattgaacagttttgaaacactccttttgtagaatctgcaagcagatatttggagtgctttgagacctatggtggaaaagtaaatatcttcacataaaaagctagacagaagcattctgagaaacttcttagtgatgtgtgcattcatctcaccgagttgaaactttcttttgattgagcagtttggaaacagtctttttctagaatctgcaagtagatattcggaacgctttttgttgtatagtggaaaaggaaataacttcacataaaaactagacagaagcagtctgagaaacttctttatgatgtgtgcattcaactcacggagtttaacatttcttttcattgagcagttttgaaaaactctttttgtattatctgcaagtggatatttggagcacatttaggcctatggttgaaaaggaaatatcttcacataaaaactagacagaagcattttgagaaacttcttgatgtctgcattcatctcatagaggtgaaacatatttttggtgagcagctttgaatcactctttttatagattctgcaagtggatatttggatcagtttatgttgtgtactggaaaagggaatatcttcacgtaaaaactagacagaaacattctgagaaacttctttcttttgtgtgcattcaactcagagacttgaacctttcttttgattgagcggtttggataccatctttttagtgtctgcaaattgatatttggagtgatttgaggcctgtagtagaaaaggaaatatcttcatataaaaactagacagaagcattctgagaaacttctttgtgatgtgtgcattcatctcacagagttgaacctttcttttgattgagcagttttggatcactctttttgtacaatctgcaagtggatatttggagtgctttgaggcctatggtagaaaaggaaatatcttcacataaaaagtaggcaggaacgttctgagaaacttctttgtgatgtgtgcattcatcttacagagttgaaattttcttttggttgagcagttttgaaacacactttttgtagtatctgcaagtggatatttggggcgctttgacgcctattgtggaaaaggaaatatcttcacttaaatactacaaagaagcattctgagaaacttctttgtgatgtgtgcagtcatgtgtcaaagctgaacctttcttttgattgaccagtttggaaacagtcttttggtagtatcggcaaatggatatttggagcgctttgaggtctatggtggaaaaggaaatatcttcacataacaactaggcagaaacattctgagaaacttctttgtgatgtgtgcattcatctcagagagtttaaccattcttttgattgagcagttttgaaacactctttttgttgaatatgcaaatgaatatttggagctctatgaggcctatagcttaaaagaaaatatcttcacataaaaactacacagaagaattctgagaatcttctttgtgatgtgtgcattcatcttcatcttacagagttgaacatttcttttgattgaacagtttggaaacactctttttgtagaatctgcaagtggatatttggagcactttaagtactatgatggaaaaaatatcttcacataaaaattagacagaagcattctgaggaacttctttgtgatgtgtgcattcatctcactgcattgaatgtttcttttgattgagcagtttggaaacagtcgctgtgtggagtcttcatagggatatttgagctcactgaggcctatgggcaaataggaaatatcttcacataaaaattagatggagtctttctgagaaacttctttgtgatatgagctttcatctcacaaagttgaaactttcatttgaatgagcagtttggaaactgtcttcttgtagaaactgcaaattgatatttggagcgctttgaggccagtggtgaaaatggaaatgtcttcatttaaaaactagacagaagccttcctagaatcttctttgtgatgagtgcattcatctcacataattgaacctttcttttgattgagcagtttggaaatagtcgttttggagaatctgcaaagggatatttgtgagtccattgaggcccatgggataatgggaaatatcttcacataaaaactaggcagaaactttctgagaagctggtttgtgaggtgtgctttcatctcacagagttgaaactttcttttgagtgagcagtttagaaatagtcttttttttagaatctgcaaatggatatttgaggcactttgaggcctatgttgaataaggaactatcctcgcttaaaaactagacagaagcattctgagaaacatctttgtgatgtgtgcattcatatcatggcgttcaaccttgctttagattgatcagtttggaaacagtctttttgtagtatttgcaaagggagattttgagcgttttgaggtctatggtgaaaaaggaaatatcttcacataaaaagtagacaaaagcattctgagaaacatctttgtggtttgtgcattcatctcccagagttgaaaatttctttttattaagcagttttgaaacactctttttgtagaaaatgctactggatgtttggagtgctttgaggcctgtggcagaaaaggggtatcttcacataaaaaccagacagaagcattctcagaaacttctttgtgatgtgtgcattcatcttagagagttgaatatttcttttgattgagcagtttggaaacattcgttttgtaaaatgtgcaaagggatatttgtgagcccattgaggcttatgggaaaataggaaatgtcttcacataaaaacttgccggaaacttgttgcaaaactactttgtgatgtgtgctttcacctcaaagagttgaaactttcttttgatagagcagttttgaaatagtctttctgaagaatctgcaaatggatatttggagcgcattgaggcttatggtgaggaaggacatattttcacataaaaactcgacagaagcattctgagaaattctttgtgatgtgtgcattcatctctcagagttcaaactttcttttgatagagcagtttggaaacaatctttttatagtatctgcaaagtgatatgtggagcacttggaggcctgcattgaaaaaggaaatatcatcaaataaaaactagacaaaagcattatgagaaacttctttgtgaggtgtgcattcatctcatagagttgaactattcttttgattaaggaattttgaaacactctatttgtagaaaatggaactggatatttggagtgcgttgaggcctgtggtggaaaaggaaatatcttcacataaaaactagacagaaactttccgataaattactttgagacgtgtgctttcatctcacagagttgaaaatttcttttgattgagctgtttggaagcatacttttcatagtaactgaaaatggatatttgtagcactttgagtcatatggggaaaaatgaaatatcttcatataaaaactacactgaaccattgtgggaaacttctttctgatgtgtgcattcatttcacagagttgaacctttcttttgattgagcaccttggaaacaacctttttgtagtatcttcaaaaggatatttggagtgctttgaggcctatggtgaaaaaggaaatatcttcacaaaaaaactacagaagcattctgagaaacttctctgtgatgtgcgcatgcagctcccagagttgaatctttcttttgattgagcagttttgaaacactgtttttttagaatctgcaagtggatatttagagcgctttgaggcctgtggtggaaaaggaaatatcttcacataaaaactagacaaaaacattctgagaaacttatctgtgatgtgtgtattcatctcagagagttaaacctttcttatgattgagcagttttgaaaacagtcgttttgtagaatcttcacagggatacttgagagcccattgaggcctatggggaaataggaaatatctttgcataaaaaatagacagaaactttctgagaaactaatttgtgatgtgtgcttttatctcacacagctgaatctttcttttgattgagaagttttgaaagagtctttttgtagaatctgcaagtggaattttggagcactatgaggcctgtggtgaaaaaggaaaaatcttcatagaaaaactagacagaagcattgtgaaaaacttatttgtgatgtgtgcattcgactcacagagttgaacctttcttttgattgtgcagtttggaaacagtctttttgtacaatctgcaactggatatttggagccctttgaggcttatggggaaaaggaaaatatcttcatataaaaactagacagaagtattctgagaaacttctttgtgatgtgtgcattcatctcacagagtggaacatttcttttgattgagcagtttggaaactgtcattttgtagaaactgcaagtggatatttggagttatttgcagcctaaggtggaacaaggaatatcttcatgtgaagacgagagagaggcattcctagaaacttctttttgatgtgtgcattcatctcacagagttgaacatttcttttgattgagaagtatggaaacagtctttttgtagaatctgcaaagggatgtttgtgagtgcattgaggcctatgggcaaacatgaaatatcttcacataaaaactagaaagaaacattatgaaaaacttcttggtgatgtgtgctttcatctcacacagttgaaactttcttttcattgagcagtttttacacagtctttttgtggaatctgcaaatggatatttggagtgctttgaggcctatcatgaagaaggaaatatcttcacataaaaaccatacagaagcattctgggaaacttccttgtgtgccttcatctcagagagttaaacctttcttatgattgagcagttttggaaacagtcgttttgtagaatcttcaaagggatacttgagagcccattgaagcctatggggaaataggaaatatcctcacataaaaaaaaaaacagaaactttctgagaaactaatttgtgatgtgtgctttatctcacagagttgaacatttcttttgattgagaagtttggaaacagtctttttgtagaatctgcaaagggatgtttgtgactgcattgaggcctatgggcaaaaaggaaatatcttcacataaaaactagaaagaaacatcatgaaaaacttctttgtgatgtgtgctttcatctcacacagttgaaactttcttttcattgagcagtttttacacagtatttttgtggaatctgtaaatggatacttggagcactttgaggcctatggtgaagaaggaaatatcttcacataaaaaccagacagaagcattctgggaaacttccttgagatgtgtgccttcatctcggagagttgagactttcttttgttagaccagtttgaatatagactttttgtagaatgtgcaagtggatatttggagtgtcttgaggccaatggtggaaaaggaaatatcttcacataaaaactagatagaagcattcttagaaacttcgttgtgatgtgtgcattcttctcacagtgttgaacatttctctttattgagaactttggaaaccgtccttttgtagaatctgcaaagggatatttttgagcccattgaggcctatgaggaaataggaaatatcttcacataaaaactagtcagaaactttctgagaaacttctttgtgatgtgtgcattcatcttacagtggtgaacctttcttttgattgagcagtttggaaaccatctttttgtagtatctgcatgtgggtattttgagtgctatgtggtctatggtgaaaaagcaactatcttcaaataaaaactagacagaagcattctgagaaacttctttctgatgtgtgcattcatctcacgaaattgaacctttcttttgattgagcaattgggaaacagtctttttgtagtatctgcaagtgtatatttggaatgatttgaggcctatggtgaaaatggaaatatcttcacataaaaactacagagaaacattctgagaaacttctttgtgatgtgtgcattcatctcatagagttgaaactttcttttggttgatcagtgttgaaacactctttttgtgaatctgtaagtagatacttggagcggtttgaagcatatggttgaaaaggtagtatcttcacataaaaagtagacagaagcattctgagaaacttctttgtgacatgtgcattcatctcacagatttgaaactttcttttaattgagcagttttccaagcagtctttttgtaaaatctacacatggatatttggagcactttgaggtctatggtgaaaaagggactatcttcacattaaaactagacagaagcattctgagaaacttctttgtgaggtgtgcattaacctcacagagttgaacctttcttttgattgagcagttttggaacagtctttttgtagtatctgcaaacggatattgtgagcgatttgattcctatggtgaaaaaggaaatatcttcccataaaaactacacagaagaattgtgagacacttctttgtgatgtgtgcattcatctcacagagttcaacctttcttttcattgagaagtttggaaactgtctttttgcagaatctgcaagtggatatttggagcactttgtggccttcagtggaaaaggaaatatattcacataaaaactggatggaagcattctgagaaacttctttttaatgtgtgcattcatctcacagagttgaacatttgttttgattgaacagtttggaaagcgtcgttttgtgggatctgcaaagggatatttgtgagcccattgaggcctatgggaaaataggaaatattttcacataaaaactagacagaaactttctgagaaacttctttgtgatgtgtactttcatctcagagttgaaattttcttttttttgagcagtttggaaatgtctttttgtagagtctgcaaatggatatttggagcgctttgaggcctatggtgaaaaaggaaatatcttcacataaaaactagacagaagcattctgagaaacttctttggatgtttgcattcatctcacaggcttgaatatttcttttgattgagctgtttggagacagtctttttgtagtatctgtaaatggatattttgagtgctttgtggcctatggtgaaaaacgaaatatcttcacataaaaattagacagaagcattctgagaaacttctttgtgatgtgtgcattcatctcatggagctgaacctttcttttgattaaacagttttcaaacactctctttgtcgaatctgcaagtggatatttggagcactttgagtcctgtggtggaaaaggaaatatcttcacataaaaactaggaagaagcattctgagaaacttctttgtgatgtgtgcattcatttcacagaggtgaacatttcttttgattgagtcgtttggaaacagtcattttgtagaatctgcaaagggatatttgtgatccctttgaggcctatggggaaataggagatatcttcacataaaaactagacagaagcattctgagaaacatctttttgatgttgtgtccagaattggtgggttcttggtctcactgacttcaagaatgaagccccgtacccttatggtgagtgttacagttcttaaaggtggcgagtctggtgtttgttttttctgatgttcagatgtgttctgagtttcttccttcttgtggttttgtagactcgctagctcaggagtgaagctgcagaccttcacagtgagtgttacagctcttaaggcagtgcatctggagttttccattcctcccagtggactcgtggtctcggtcacttcaggagtgaagctgcagagcttcaccttgagtgttgcagctcataaaggcagtgtggacacaaagagagtgagcaccagcattatttattgcaaacagtgaaagaacaaagcttccacagtgtagaagggtccccaagcaggttgccactgctggctctggcagcctgctttttattctcttatctggccccacccacttcctgctgatttgtagagcccagtggactgttttgacagggcactgattggtgcatatacaatccctaagctagacacaaaggctcttcatgtccccaccagattagctagatagagtgtcaacacaaagttatccaaggccccatcagagtagctagatacacggtgtcgattggtgcattcacaaaccctgagctagacacaggatgctgattggtatgtttacacactttgagctagatacagagtgcgattggtatatttacaacccctgggctagacataaaagttctccaagtccccatgagaatagctagatacagcatgtcaattggtgcactcaaaatccctgagctagacacagggtgctgattggtgtgtttacaaaccttgatctagatacagagtgctcattatgtgagcactggaaatatatgaagatatttccattttcaccacaggtctcaaactgctctcaaatatccctctgcatattctgcaaaaaactgtgttcaaactgttcaatcaaaagaaattttcacctctgtgagatgaatgcacacatcacaaagaagttcctcagaattcttctgtctagtttttatatgaagatacttcccttttcaccataggcctcaaagcactccaaatatccatttgaagattccacaaaaagactgttaccaaactgctcaaccagaagaaaggttcaattctgtgagatgaaagcacacatcacaaaggggtttggcagaaagcttctgtctactttttatgtgaagatacttctttttcacctgaggtggcaaagagctcagaaatatcccaatgcagattgtacaaaaagacggtttccaaacagctgaaccaaaaggaagtttcaactctgcgagatgaatggacacctcacaaagaagtttctcaaaaagtgtctgtctagcttttacatgaaggtatttccttttccactatatgtctcaaactgctcacaaatattcctctgcagaatctacaaaaagtctgtttccaaactactcaatcaaaagaaagattcagctcagtgagatgaatgcaaaccccacaaagaagtttctcagaatgcttccgtctagtttttatatgaagaaatttcctcttccaccataggccccaaagcactccaaatatccattcacagattctacaaaaagactctttcaaaacttctcaatcaaaagaaagattcagctgtatgagatgaaagcacacatcacaaagaagtttctcagaatgcttctgtctattttttatgtgaagatatttcatattacaccccaggcctcaatgacatcacaattattcctttgacgattctacagaaaactgtttccaaactgctcaatgaaaagaaaggttcaactctttgagatgaatgtgcacatcacaaagcagtttctcagattacttttgtctagctttcatgtgaagatatttacattttcaacataggcttcaaaccgctcataaatatccatctccaaattctacaaaaagactgtttctaaactgctaaatcaaaagaaagtttcaactctgtgtgatgaatgcagacatcacaaagaagtttctcagaaacgttctgtctagtttttatgtgaagctatttcctatttcaacatgggcctcaaaggcctcgcaaatatccctttacagattctacaaaaagattgtttccaaactgctaaatcaaaataaaagttcaaccctgtgatatgaatgcacacatcacaaagcagtttctcagaatgcttctgtctagtttctatgtgaagatatttccattttcacaataggcacaaaactgctcacagataaccctctgcatattctgcaaaaagactgcttccaaactgctcaatgaaaagaaatattcaactctgggagataaatgcagtcatcacaaaaaagtttcaaagaaatcttctgtttagtttttatgcgaaaatattagctttttcaccataggtctcaaagaggtccaaatatacatttgcaaattccacaaaaagatggtttccaaactgctgaatcaaaagaagatctcaagtctgtgagatgaatgtacacatcacaaagaagcttctaagaatgtttctgtctagtttttatgtgaagatatttcccttttcaccacaagcctcaaagcgctccaaatatcaatttgctgatactataaaaagactgttacaaaactcctcaatcaaaacaaagtctcaagtctgtgagatgaaagcaaatatcacagagaagtttggcagaaagcttccaccaagtttttatttgaagatatttctttttcaacataggctgcaaaccactcagaaatatagctttgcagattgcacaaaaacactgtattctaacttctcaaacaaaggaaaggttcaactctgagagatgaaagctcacatcacaaagaagtttctcagaatccttctgtgttgtttttatgtgaggatatttcctatttcaccttgggcctgaaaggtttcacaaatatccctttgcagattctagaaaaagactgtctccaaactgctcaatcaaaagaaaggttcaactttgtgagatgaatgcacacatcacacagcagttttgcagaatgtctctgtctagtttttatgtgaagatatttccattttcaccgtaggcctcaaacagctgagaaatatccctctacaaatgctacaaaaacactgtttccaaactgctcaattaaacaaaaggtgcaacagtgtgaggtgaatggacaaatcacaaggaagttgctcagaaatcttccattccttttttatgtgaagatattagctttttcactttaggcctcaaagaggtccaaatatctatatgcagatacgacaaaaagacttttttcaaactgctcaatgaaaagaaaggttcaacactgtgagaagaaggcacaatcaaaaagaagtttctcagaatgattctgtgaagtttttatgtgaagatatatcctttccagctataggccccaaagaactccaaatatccatttgaagatactacagaaagagtgtttccaaactgctcaatcaaaagaaatgttcaacactgtgagtagaatgcatacatcacgaagacgtttctgagaatgcttctgtctagacttatgtgaagatatttccttttccaccgtaggcccaaaagccccccaaatatccacttgcagatactacaaaaagagtgtttctaaactgctcaagaaaaagaaaggttgaactatgtaagatgaatgtacacatcacaaaaagtttctgagaatgcttctgtctagattttatgtgaagatatttccttctccaccgtaggcctcaaaccactccaattatccgtttgcagataatacagaaagagtgtttccaaactgctcaatcaaaagaaaggttcaactctttgagttcaatgcacacatcacaaagcagtttctgagaatgcttctgtctagttttcatgtgaagatatttccttttctaccataggcctccaagagctccaaatatccacttacagattctccaaaaagagtgtttcaaactgctctatcaaaaggagggttcaactctgttagttgaatgcacacatcacaaagaagtttctgagaatgcttctgtctaatttttatgtgaagatattcccgtttccaacaaaggcttcaaagcggtccaaatatccacttgcagattctaccaaagagtgtttccaaactggtcaatcaaaagaaagtttctactctgtgaggggaatgcacacatcacaaagaagttaatgagaatgcttctgtctactttttatatgaagatattcccttttcaactataggcctcaaagcactccaaatatccatttgcagataatagaaaaaaagggtgttttcaaactactcagtcaaaagaaaggttcaactctgtgagttgaatgcacccatcacaaagaattttgtgagaatacttctgtctagttttcatgtgaagatatttccttttccaccatagccctcaaagccctccaaatatccacttgtagattctacaaaaagagtgtttccaaactactgaatctaaaggaagattcaactctgtgagatgaatgcacacatcacaaagtagtttctcagaatgcttctgtctaccctttatatgaagatatttccttttcaactacaggcctcaaagcgctccaaatatccacttgcagaaactaactgcaaaaagagtgcttctaaactgctcaatcaaaagaaaggttcaattttgcgagtttaatgcacacatcacaaagaagttactgagaatgcttctgtctagttttcatgtgtagatatttccttttccaccacaggcctcaaagcgctccaaatatgcacttgcagattctacaaaaagagtgtttaaaactgctcaatcaaaagaaatgttcaactctgtgagatgaatgcacacatcccaaaaaaatttctcagaatgcttctatctactttttatgtgaagatatttccttttcagctattggtcacaaagcattccaaatatccatttgcagatacaactaaaagattttttccaaactgctcaatcaaaagaaatgttcaaccttctgagttgaatgcacacatcacaaagaagtttctgagaatgcttctgtctagtttttatgtgaagatatttccttctccaccataggcttcaaaccactccaattatccatttacagatactacaaaaagtgtttcaaactgctcaatcaaagaaagcttcaactctttgagttgagtacacacataacaaagcagtttctgagaatgcttctgtctaattttcttgtgaagatatttccttttccaccataggcctcaaagcactccaaatatccacttgcagattctacaaaaacactgtttcgaaactgctcaatcaaaacaagtgttcaaacctctgagttgaattaaaacatcacaaagaagtttctgagaatgcttctgtctagtttttatgtgaagatatttccttttccactataggccacaaagcgctccaaatatccacttgcagaccctacaaaaagagtgtttcaaaactgctcagtcaaaagaaaggtcgaactctgtgagatgaatgtacacatcagaaagaagtttctcagaatgcttctgtctagtttttatatgaagatatttccttttcaacaatagacttcaaagggcttcaaatatccattagaagatactacaaaaaaaagagtgtttccaaacttctcaatcaaaagaaaggttcaactctgtgagttgaatacacacatcacagagaagtttctgagaatgcttctgtctaatttttatgtgaagatatttcctttttcaccataggcctcaaactgctccacctattcacttgcagattctaaaaaaagagtgtttcagaactgctcaatcaaaagaaggattcggctctgtcagatgaatgcacacatcacaaagcagtttctgagaatgcttctgtctagtttttatgtgaagatatttccttttccaccatagacatccaagggctccaaatatccaccggcagtttctacaaaaagagtgtttcaaagctgctcaataaaaagaatatttcaactctgtgagatgaatgcacacatcacaaagaagtttctgagaatgcctctgtctggttttggcatgaagatatttccttttccacaataggcctcaaagcgctccaaatatccacttgcagattctataaaaagagtgtttcaaaactgctcagtcaaaagaaagactcaacactgtgagatgaatgcacacataacaagaagtttctcagaatgcttctgtcaagtttttatgtgaagatatttccttttcaattataggcctcaaagtgatccaaatatccattggtggttactacaaaaaagaatgtttccaaacttctcaatcaaaataaatgttcaaatctgtgagttaaatgcacacatcacaaagaagtttcttagaatgattctgtctactttttatgtgaacatacttccttttccaccataggcttaaagcactaaaaatatccacttgcagattctacaaaaagagtgtttcaaaactgctcaatcaaaagaaaggttcaactctgtgaaatgaatgcagacaccacaaagtagtttctgagaatgcttcagtctagtttttatgtgaagctatttccttttccaccattggcctcaaagtgctccaaatatccacttgcagatactacaaaaaagtgtttcaaaactgctcagtcaaaagaaaggttcaactcagtgtgatgaattcaaacatcacaaagaagttaatgagaatgcgtctgtctagtttttatgtgaaggtatttccttttcagctataggcctcaaagggctccaaatatccatttgcagttacaagaaaaaaagagtgtttccaaactgctcaatcaaaagaaaggttcaactctgtgagttgaatgcacacataacaaagaagtttctcagaatccttcagtctagtttttatctgaagatatttccatttccaccatggacatcaaagtgctccaaatatccactgtcaagttctacaagaagagtgtttcaaagctgctcaataagcagaaaatttcaactctgtgagatgaatgcacacatcacaaataagtttctgagaatgcttctgtctagtttttatgtgaagatatttccttttccaccataggcctcaaaactctccaaatatccacttacagattctacaaaaagagtgtttcaaaactgctcaatcaaaagaaagactcaactctatgagatgaatgcacacacaacaaagaagtttctcagaatgcttctgtcaagtttttatgtgaagatatttccttttcaaatataggcctcaaagcaatccaaatatccattggcggatactacaaaaaagagtgtttccaaactgctcaacgaaaagaaagactcaactctgtgagttgaatccacgcaccacaaagaaggttctcagaatgcttctgtatactttttatgtgaacatatttccttttccacaataggtctcaaagcaatcaaaatatccacttgcagattctacaaaaagcatgcttcaaaactggtcaatcaaaagaaaggttcaactctgtgagatgaatgcacacatcacaaagaagtttctgagaatccttctgtctagtttttatgtgaagatatttccttttcagctatagaccccaaagtgctccaaatatccatttgcagatagtagaaaaaaagaatgtttccaaattgctcaatcaaaagaaatgttcagatctgtgagttgaatgcacgcatcacaaagaagtttctgagaatgcttctgtcttgtttttatgtgaagatatttcctttcccaccatgggcctcaaccacttgaagtatacacttgcagattctacaaaaagagtgtttcaaagctgctctatcaaaagaaaagttcaactctgtgagatgaatgcacacatcacaaagaatttaatgagaatgcttctgtcaagtttttatatgaaaatattgacttttcagctataggacacaaagcgctccaaatatccatttgcagatactagaaataaagggtgttttcaaactgctcaatcaaaagaaaagttcaactctgtgagttgaatgcacccatcaaaaagcagtttgtgagaaagcttctgtctagtttttatttgaagatatttccttttccatcataagcctcaaagtgctactaatatccacttgcagatactacaaaaagagtgtttcaaaactgctctatcaaaaggaaggttcaactgtctgcattgaatggacacatcccaaagaagtttctgagaatgcttctgtctagtttttgtgtgaagatatttccttttcagctatagaccccaaagcgctccaaatatccatttgcagatagtagaaaaaaagaatgtttccaaactgctcaatcaaaagaaatactcaaatctgtgagttgaatgcacgcatcacaaagaagtttctgacaatgcttctttcttgtttttatgtgaagatatttcctttcccaccatgggtctcaaagccctcgaaatatacacttgcagattctgcaaaagagtgtttcaaaactgcttaatcaaaagaaagactcaactctgtgagattaaggcaaacatcagagttagtttctcagaattcttctgtctagtttctatgtgaaggtatttccttttcaactataggcctcaaagcactccaaatatccatttgcagatactaactgcaaaaagagtgtttccaaaccactcaatcaaaagaaagtttcaattctgtgatttcaatgcacacatcacaaagaagtttctcagaatgcttctgtctagtttttatgtgaagatatttccttttccaccataggcctcaaagcgctacaaatatccacttgcagatcctacaaaaagagtgattcaaatctgctacatcaaaagaaaggttcaactctgtgagatgaatgcacacatcacaaagtagtttcccagaatgcttctgtctagtttttatgtgaagatatttccttttcagctataggcctcaaagcgatgcaaatattcatttgcagatactataaaagattgtttccaaactgctcaatcaaaagaaaggttgaactctttgaggtgaatgcacgcatcaaaaagaagtttctgagaatgtttctgtctagtttttatgtgaagatatttccttttccaccattggtttcaaagcgctccaaatatcctcttgtgtatcctacaaaaagagtttttcaaaactgctcaatcaaaagaaagtttcaactctgtgagatgaatgaacagatcacaaagaagtttctgagaatatttctgtctagtgttcatgtgaagaaattaccttttgagctatagtcctaaagcgctgcaaatatccatttgcagatactaaaaaaaaagatggtttccaaactgcttaatcaaaaaaagttcaactctgtgagttgaatgcacacatcacaatgaagtttctgagaatgtttctgtctagtttttatgtgaagatatttccatttccatgacaggcctcaaagtgctccaaatatccacttatagattctacaaaaagagtggttccaaactgctgtatctaaagaaagattcaactctgtgagataaattcacacatcacaaagtagtttctcagaatgcttctgtcttgcttttatgtgaaaatagttccttttcaactataggcctcaaagcgctccgaatatccatttgcagatactaactgcaaaaagagtgcttccaaaccgatcaatcaaaagaaatgttcaattctatgagttgaatgcatacatcacaaataagtttctgagaatgcttctgacgagttttcatgtgaagatatttccttttccaccataggcctccaagcactccaaatatccacttgtagattctaaaaaggagtgtttcaaaattgttcaagtaaaagaaaatttcaactctgtgagatgaatgcacacatcacaaagaagtttcttagaataattctgtctagtatttatgtgaagaaatttccttttcgactataggcctcaaagtgctccaaatatccatttgcagatgctacaaaaagagtgtttctaaactgctcaatcaaaagagacattgaactctgtgagttgaatgaacatatcacaaaaaagtttctgagaatgcttctgtctagtttttatgtgaagatatttcctttaacttcataggcctcaaagtgctccaaatatccacttgcagattagacaaaaagagtgtttcaaaaccgctcaatcaaaagaaggtttcaactctgagatgaatgcacgcttcacaaataaatttttcagaatgcttcagtctaatttttatgtgaaggaatttccttttcagctacatgcctcaaagtgctccaaatatcaatttacagatacaacaaaaagagtgtttccattctactcaatcaaaagaaagattcagctttctgagttgaatgcccacatcacaaagaagtttctcagaatacttctgactagtttttatgtgaagatattcccttttccaccataggcttctaagccatcaaaatatgcacttgcaaatactacaaaaggagtttttcaaaactgctcaataaaaagaaaggttcaactctgtgagatgaatgcacacacacatcacaaagaagtttgtcagaatgcttctgtctagtttttatgtgaagatatttccttttcagctataggactataagcgctccaaatatccatttgcagatactacaaaaacagtgtttccaaactgctaaataaaaagaaacttcaactctgttagttgaatgcacaaatcacaaggaagtttctgagaatgcttctgtctagtttttatgtgaagatatttacctttccaccatatgcctgaaagtgctccaaatatctccttgcagattctacaaaaagagtgtttcaaatctgctctctgagaagaaaggttcaactatgtgagatgaatgcacacatcacaagtaagtttctcagaatgcatctgtccactttttatgtgaagatatttctttttcaactataggtctcaatgctctccaaatagccacttgcagattctccaaaaacagtgttgaaaactgctcaatcaaaagaaatgttcccatctgtgagatgaacccatacatcacaaataagtttctcagaatgcttgtgtctagttttactgtgaagatatttccttttccaccatagacctcaaagcgctccaaatatccacttgcaaattctacaaaaagagggtttcaaaactgctcaatcaaaaagcaagtttcaactctgtgagatgaaagcacacattacaaagaagtttctgagaatccttctgtctactttttgtgtgaagatattaccttttccaccataggcataacagtgctccaaatatccctttacatatactacaaaaaaagtgtttccaaactgctcaaacaaaagaaacgttcaactctgtgagttgaatgcacacatcacaatgaagtttctgagaatgtttctgtctagtttttatgtgaagatatttccatttccatgataggcctcaaagtgctccaaatatccacttatagattctacaaaaagagtggttccaaactgctgtatctaaagaaagattcaactctgtgagataaattcacacatcacaaagtagtttctcagaatgcttctgtcttgcttttatgtgaaaatagttccttttcaactataggcctcaaagcactccaaatatccacttgcagattctacaaaaagagtgtttcaaaactattcaatcaaaaaaaaggttcaactctgtcagttgaatggacacatcacaaagaagtttctcagaatgctactgtctactttttatgtgaagatatttctttttcaactataggcctcatagcactccaaatacccatttgcagatactacaaaaggagtgtttccaaactgctcaattaaaacacaggttgaactctgtgacttgaatgcacacatcagaaagaagtttctgagaatgcttctgtctgctttttatgtgaagatatttcattttgcaccatacgcctaaaatctctccaaatatccgattgcagattctacaaaagagtgtttcaaaactgctcaatcaaaagaaaggttcaacagtatcagacgaatgcacaaatcacaaagaagtttctgagaatgcttgtgtctagtttttatgtgaaggtatttccttttcaaccacatgcctcaaagcactacaaataccatttgaagatactattaaaagagtgtttccaaactactcaatccaaagaatcatttaattctgtgaaataaatgcatcatcacaaagaagtttctcagaatgcttcagtctagtttttatctgaggatatttccttttcagctttaggcctcaaagcactacaagtatccacttgcagatgctacagaaagggtgtttccaaacttctcaatcaaaagaaatgttcatctctgtgagttgaatgcacacatcacaaagaactttctgagaatgcttctgtctagtttttatgtgaagatatttccttttcactgtaggctcaaaatcgtccaaatatccatttgcaggtactacaaaaagactgtttccaaaatgctcaatcaaaagaaagtttcaaatctgtggcttgaatgcacatatcagaaagaagtttctgagaatatttctgtctagtttttatgtgaagatatttccttttccaccataggcctcaaagtgctccaaatatccacttgcagtttctacaaaaagtgtgttggaaaactgctcaatgaatagaaactttcaactctgtgagatcaatgcacacatcacaaagaagctattcagaatgctcttgtctattgtttaagtgaagatatttctttttgagatatagacctcaaattgatccaaatatccatttgcagattctacaaaaaaagtgtttccaaactgctcaatcaaaagaaaagttcatttctgtgagtaaaatgcacacatcacaaagaagtttctcagaatgctcctgtctaccttttaagtgaagatatttcttttcgagttatagacctcaaagtgatacaaatatccatttgcagattctacaaaaacagtgtttccaagctgctcaatcaaaagaaaggttcaattctgtgagtaaaatgtacacatcacaaagaagtttctgagaatgcttctgtctagtttttatgtgaagatatttccttttccaccatagacctcaaagcgcaccaaatatccacttgcagattctacaaaaagagtatttcgaaactactcaatgaaaaaaaaggttcaactctgtgagatgaattcataaatcacacagaaatttctcagaatgcttctgtctagtttttatgtgaagatattaccttttcagctataggcttcaaaaagtacaaaatatgtgtttgcggatactacaatacgagtgtttccaaactgctcaataaagcaaaggtccaactctgtgagttgaatgcacacatcactaagaagttgctgagaattcttctgtctagttttgatgtgaacatatttccttatccaccataggcctcaaagtgctcccaatatccacttgcagattctacaaagagagtgtttcaaaactgctcaacgaaaataaagtttcaactctgtgagatgaatgcacacaatacacagaacttcctcagcatgcttctgtctagtttttatgtggcgatatttgcttttcagctttaggcgtcaaagcgctccaaatatccacttgcagattctccaaaaacagtctttcaaaactgctcagtcaaaagaaaagttcaattctgtgagatgaatgcacacataacagagaagtttctcagaaagcttctgtctagtttttatgtgaagacatttccttttcaacaacaggcctcaaagcactccaaatatccatttgcagatactacaaaaagagtgttcccaaactgcttaatcaaaagaaaatttcaactctgtgaaatgaatgcacacatcaaaaagtagtttctgcaaatgcttctgtctagtttttatgtgaagatatttccttttccaccataagcctcaaagcgctccaaatatccacttgcagattccgcaaaaagagtgtttcaaaactgcttaatcaaacgacagattcaacttgtgagatgaatgcacacatcacaaataagtttctcagaatgcttctgtctagattttttgtgaagacatttccttttcaactataggcctcaaatggctaccaatatccatttgcagatacttcaaaaagagggtttctaagctgctcaatcaaaagaaagtttcaactgtgtgagttgaatgcataaatcacaaagaagtttctgagaatgcttctgtccagtatttatatgaagatatttgcttttctgccaatggcctcaaagcactccaaatatccacttgcagattccacaaaaagagtgcttcaaaactgctcaattaactgaaaggttcaattctgtgaattgaacgcacacatcacaaaggtgtttctgagaatgcttctgtctagtttttatgtgaagatatttccttttccaccatagtactcacagcgctccaaatatccagttggagatgctacaaaagattgtttcaaaactgcttaatcaaaagaaaggttcaactctgtgagatgaatgcacacatcagaaagaagtttctcacaatgcttttgtctagtttttatgccaagatatttccttttcagctgcaggcctcaaagcgctccaaatatccattgtcagatactaccaaaagagtgtttccaaactgctatatcaaaagaaaagtttaactctttgagttgaatgcacacatcacaaagaattttctgagaatgcgtctgtgtggtttttatgtgaagatatttccttttccactgcaaacctcaaagcactctcaatatccatttgctgattctacaaaaagagagtttcaaaactgctcaatcaaaagaaagattcaactctgtgagttgaatgcacacatcacaaagaagtttctcagaattcttcagtctactttttatgtgaaaatatttccttttcaactgtaggcttcaaagcgctccaaatatccatttgcagatactacaaaatgggtgtttccaaactcctcaatcaaaagaaatgttcaactctttgagatgaatacacgtatcacaaagaagtttctcagaatgcttctgtctagtttttatgtggagatatttccttttcagccgtaggcctgaaagcgttccaaatatccatttgcagacactacaaaaagagtgtttctaaactgttcagtcaagagaaaggtttaactctgtgagttgaatgcacacatcacaaagaagtttctgagagtgtttcctctagtttttatgtgaagatatttccttttccaatgtatgcctcaaagcactccaaatgtccacgtgcagaatccacaaaaagactgtttcaaaactgcttgatcagaaaaaaggttcaactccatgagatgaatgcacacatcacaaagaagtttctcagaatgcttctgtcttgtttttatatgaagatatttccttttcagctataggattcaaagtgctccaaatatccacttgcagatactaaaaaaagagtgtttcccaactgctcaataaaagaaaggttcaacactgtgagttgaatgcacacatcaaaacgaagtttctgagaatggttctgtcttgtttttatgtgaagatatttccttttccccctaggccaaaaagtgctccaaatatccacttgcagattctacaaaaagagtgtttcaaaactgctcaatcaaaagaagggttcaactctgtgagatgaatgcacacaacacaaataactttctcagaatgcttctgtctagttttatgtgaagatatttccttttcaactacaggcctgaaagcactgcaaatatccacttgcagatactacaaaaagagtgattccaaactgctcaatcaaaagaaagtttcaactctgtgagttgaatgcacacatcacaaagaagattctgagaatgcttctgtctggtttttctgtgaagatatttccttttaaaccatatgcctggaattgctccaaatatccaacttcagattctacaaaaagaatgtttcaaaactgctcaatgaaaagaaaggttgaacgctgtgagttcaatacacacatcaaaaaagtttctcaaaatgcttctgtctagtttttatgtgaagatatttccatttccaccattggcctcaaagcgcttcaagtgtcccattgcagattcttcaaaaagtgtgtttgaaaactgctcaatcaaaagacaagttcaaatccatgagatgaacgcacacatcacaaagaagtttctcagaatgcttctgtcttgtttttatatgaagatattttcttttcagctataggcttcaaagcgctccaaatatccaattgcagatactaaaaaaagagtgtttccaaactgctcaataaaagaaaggttcaacactgtgagttgaacgcatatatcacaaagaagtttcccagaatgtttctgtctagtttttatgtgaagatatttccttttccaccataaacctcaaagcactctcaatatccctttgacgattctacaaaaagagtgtttcaaaactgcttaataaaaagaaaggttcaactctgtgagatgaatgcacacatcacacagaagtttctcagcaggcttctgtctagtttttatgtgaagatatatccttttcaaccataggcctcaaagcactccaaatatccacttgcagattctacaaaaacagtgtttcaaaactgctcagtcaaaagaaatgttcaaaaatgtgagatgaatgcacacatcacaaaaaagtttctcagaatgcctctgtctactttttatgtgaagatacttccctttccactataggcctcgaattgccacaaatatcaactttgaaattctacaaaaagaatgtttcaaaaccgctctatcaaaagaaaggttcagtgctgtgagttgaatgcacacagcacaaagcagtttctcagaatgcttctgtctagtttttatgtgaagatatgtgcttttcctccatagtcctcaaaggctccaaatatccacttgtagattctacaaaagcagtgtttaaaaactggtcaattaaaagaaagtttcaactctgtcagatgaatgcacacatcacaaacaagtttttgagaatgctcctgtctattttttatatgaagatatttccttttccaccataggacctacagcactccaaatatccaattccagattctacaaaacagtgtttcagaactgcacaatcaaaagaaagttacagctctttgaggtgaatgcacacatcacaaagatgtttctcagaatgcttctgtccagtttttaagtgaagatttttccttttccactgtaggcagcaaagttctccaagtatccacttgtagattcgacaaaaagagtgtttcaaaagtgctcagtcaaaagaaatattcaacactgtgatgtgaatgcacacattgcaaagaagtttctcataatgcttctgtatagtttttatgggaagatatttccttttccaccataggcttcaaagcgctctaaatatccactggcaggcactacaaaaagagtgtttcaaaattgctcaattaaaagaaaggttgaaccctgtgagatgaatacacaaaccacaaagatgtttcccagaatgcttctgtgtagtttttatgtgaagatatttccttttccactataggccacaaagcattccaaatatccacttgcagatactacaaaaagtttgtttccaaactgctcaatcaaaagaaagtttcaactgtgtgacatgaatgcagacatcaaaaagaagtttctctgaatgctttgttctagtttttatgtgaagatatttccttttccactatagacctcaaagcactccaaatatccatttgcagatactccaaaaagactgtttccaaattgctcaattaaaagaaagtttcaactctatgagttgaatgcacacatctcaaagaagtttctcagaatgcttttgtctggtttttatgtgaagatattcccttttccactgtagacctcaaagccttccaattatcctcttgtagattttacaaaaagagtgtttcaaaactgctcaatcaaaagaaaggttcaactctgtgagatgaatgcacacattgcacagaagtttctcagaatgtttctgtctagtttttatgtgaagatatttccttttccaccacaggacccaaagcactacaaatattcacttgcagatactacaaaaggactgttccaaactgctcaatcaaaagaaaggttcagctctgtgaattgaatacacacagcacaaagaagtttctcagaatgtatctgtcaattttttatgtgaagatatacccttttccaccataggttcaaagcactccaaatacccactggcagatactacaaaaagattgtttcaaagctattccatcaaaagaaaagttcaactacgtgagaagaacacacacatcacaaagagttttctgagaatgcctctgtctggtgtttgtgagaagatatttccttttccaccatatgctgcaaagctattcatatatcccattgcagaaagtacaaaaagactgttttcaacctgctcaatcaatagaaaagttcaatcctgtgagttgaatacagaaatgcaaggaagtttctctgaatgcttctgtctagtttttatgtgaagatatttccatttccacgataggactcaaagcgctccaaatatccatttgcagataccacaaaaagacggtttccaaactgctcaatcaaaagaaatattcaactctgtgagatgaatgcacacatcacaaaggagtttctcagaatgcttctgtcaagtttttatgtgaagatatttccttttcaaccataggcgttaaaagtgttccaaatatccacttggagatactacaaaaagactgtttccaaactgctcaatcaaaagaaaagttcacatctctgagttgattacacacatcacaaagaagtttctcagtatgattctgtctagattttaagtgaagatatttccttttccaccataggcctgaaagcactccaaatatccacttgcagattctacaaaaagagtgtttccaaactgttcaataaacagaagggttcaactctgtgagatgaattcacacaacacatagaattttctcagaatgtttctggctagtttttatgtgaagatatttccattttcactataggactcaaagtgctccaaatatccatttgcagatactacaaaaagacagtttccaaactgctcaatcaaaagaaatattcaactctgtgagatgaatgcacacatcacaaaggagtttctctatatgcttctgtctagtttttatgtgaagacattttcttttccaatataggcttcaaagcgctctaaatatccgcttgcagattctacaaaaagagtgtttccaaactgtttaatcaaaagaaaggtccaactcagtgagatgaatgaacacaacacaaaaactttgtcagaatgcttctgtctagtttttacttgaagatatttcctttttcaccttaggcctcaatgtgttccgaatctccttctgcacatactaaaaaatactgtttccaaacttctcaatgaaaagaaaggttcaactcttttagatgaatgcacacatcacagcgaagtttctcagaatgcttctgtcttgtttttatgtgaagatatttccttttccacaatagcccacaaagcactccgaatatgaacttgcggattctgcaaaaaaagtgtttccaaacttatgaatcaaaagaaagtttcaactctgtgtaaggaatgcacacaacacaaagaaattagtcagaaaatttctgccaagtttttatgtgaagatattacctatttccccagaggcctcaatgggctcaaaaatattccttcagagattctacaaaacaactgtttccaaactgctcaatcaaaaaaaaagtttcaaccatgtgacatgaatgctctcatcgcaaggaactttctcagaatgcttctgtctagttttcatgtgaagatatttttttttcaccacaggcatcaaagcgctccaaatatcaatttgcagacacttcaaaagtactgtgtccatactgctcaatcaaaaggaaagtttagctctgtgagatgaatgaacacgtcacaaagaaatttctccaaatgcttccatccagtttttatgtaaagatattttcttttccactataccccacaaagcgctattaaaatacacctgcagtttctatcaaaaggctgtttccaaactgcacaatcaaatgaatggttcaactctgtgagatggattcacacatcacaaagacatttctcagaatgtttctgtctagtgtttatatgaagaaattcccttttccaccatgggcctcaaagcgctccaaatatccactttcagattgtacaaaaagagtgtttcaaaactcctcaatcaaaagaaaggttcaactctgtgagatgaatacacccatcacaaagaagtttctttgaatccctctgtctagtttttatgtgaagatatttccttttccactatgggcctcaaatcacaccaaatatcaatttgcagatactacaaaaagagtgtttacaaactgctcaatgaaaagaaaggtttaactgtgaaatgaatgcgcacattacaaagaagtttctcagaattcttctgtctagtttttatgtgaagatatttccttttccactataggccacagagcactctaaatacccactttcagattctacaaaaagagtgtttcaaaactgctcaatcaaaagaaaggctaaattctgtgacatgaatgcacacatcacaaagaggtttctgagaatgcttctgtctagtttttatgtgaagatatttccttttccactataggcctcaaagcactccaagtatccacttgcagatactacaagaagactgtttccaaactgctcaatgaaaagaatttttcaactctgtgagatgaaagcacacaacacacataagtttcccaaacgtttcactctagattttatctgaagagatttcctattttcccagaggcctcaatgggctcacacatatctctttccagaatctacaaaatgactctctccaaagtgctcaataaaaagaaagattcacctctgtggggtgaatgcacacatcacaaagacgtttctcagaatacttctgtctagtttttatgtgaagatatttcctatttcctgagaggtctcaatgggctcacaaatatcccattgcagattctacaaaacgactgctttcaaaatgctaaatcaaaagaaagttttaactctgtgagttgaatgcactcatcacaaagaagtttctcagaatgcttctttctagtttttatatgaagatattcccttttccacaaaaggtctcaattgagctccaaatatccacttgcagatactacaaaaagactgtttccaaactgctcaatcaaaacaaatgttcaactctgtgagatgaatgcgcacattacaaagaagtttctcagaatgtttctgtctagtttttatgtgaagatgtttcctttttcaccataggcctccaagcgttccaattatccacttgcagattccacaaaaagggtgttccaaaactgctcaatcaaaagaaagtttcaactctgagagatgaatgaacacatcacagagaaatttctgagaatgcttctgtctagtttctatgtgaagatatttatttttccacaataggcctcaaagctctccaaatatccacctgcagattctagaaaaagagtgtttcacaactgctcaatcaatagaaagtttcaactctgtgagatgcatgcacacatcacaaaagtttctcagaatgcttctctctagtttttatgtgaaggtatttccttttccatcatagtcctcaatgtgctccaaacatccactagcagattctacaaaaagaatgtttccaaacttttcaatcaaaagacaggttcaactctgtgagatgaatgtgcacatcacaagcaaggttctcagaatgcttctgtctcgtttttatgtgaagatattttcttttcctcagtaggccacaaagtgctccaaaaatacactagaagattccagagaaagagtgtttcaaaactgctcaatgaaacgaaatgttcaactctgtgagatgaatgcacacatcaccaagaagtttctcagaaagtttctgtctagtttttatgtgaagaagtttcctatttccccataggcttcaaaggactcacaaatttccctttgcagtttatagaaaacgaatgtttccacactggccaataaaaagaaatgtgcaactctgtcagatgaatgcacccatcacagagaagtttctcagaattcttctgtctagtttttatgtgaagatatttcatttttcaccagagttctcaaagagctccaaatatccatttgcagattctacaaaaggtctgtttccaaactacccaatcaaaggaaagtttcaactctgtgagatgaaagcacacatcagaaagaagtttccagaaagtttctgtctagttttcgtgtgacgatatttcctatttctccataggcctcaatggtctcacaaatatccctttggagattctacaaaaccactgtttccaaactgctcaatcaaaagaaatgttcaactctgtgaaatgaatgcacacatcacaaataagttgcagagaatgtttctatctagttttcatgtgaatatatttccttttccaccataggcttctaggtgccccaaatatccacttgcagattctacaaaaagagtgtttcaaaactgctcaatcaaaagaaaggttcaactgtgtgagctgaatgcacatatcacaaagaagtttctgagaatgcttctgtctagtttgtatgtgaagatatttccttttccatcttaggcctcaaagtgctccaaatatacattttcagattctacacaaagagtgtttcaaaactgctcaatcaaagaaacattcaactctgtgagatgaaagcagacatcacaaacaagtttctcagaatgcttctgtctactttttatgtgaagatatttccatttcaccataggcctcaaagcgctccaaatatccactggcatattctacaaaaagattgtttcaaaactgctcattcaaagaaaggttcaactctgtcagatgaatgcaaacatcacaaagaagtttctcggaatgtttctttctagtttttatgtgaagatgtttcctatttccccataggccacaatgggctcacaaatatccatttgcagattctacaaaatgcagttttccaaactgttcaatcaaaagaaatgttcccatctgtgagatgaacgcatacatcacaagtaagtttctcagaatgcttgtgtctagtttttatgtgaagatatttccatttgcaccataggcctcaaagtgcaccaaatatccatttgcagatactacaaaaagaccgttttataactgctcaatccaaagagaggttcaactctgtgagatgaatgcacacatcacaaagaagtttctcagaatgcttctgtctaatatttatgtgaaggtatttcctttatcaccataagccccaaggccctccacatatccctttgcagatcctacaaaaagactgattccaagctgctcaatcaaaagaaagtttcaactctgtgacatgaaagcaaacagcacaaagggttttctcagaaagcttctgtctggttttcatgtgaagatatttccaatttctccacaggcctctaagcgctccaaatatgcacttgcacattctgcaaaaagagtgtttcaaaactgctcaatcaaaagaaagtttcaactctgtgaggtgaatgcacacatcacaaagaagtttctcagaaggtttctgtctactttttatgtgaagatgtttcttatttccccttaggccacaattggatcacaaatatccctcggcagatattataaaaggaaggtttccaaactgctcaatcaaaagaaatgttcccatctgtgagatgaacccatacatcacaaataagtttctcagaatgcttgtgtctagttttactgtgaagatatttccatttgcaccataggcctcaaagcactccaaatatccatttgcagatactacaaaaaggctgttttccaactgctcaataaaaagagaggttcaactctgtgagatgagttcacacatcacaaagaagtttctcaaagtgctactgtctagcttttatatgaagatatttccttttttcaccataggccccaaagtgctccaaatatccatttgcagattctacaaaaatactgcttccaaactgctcaatcaaaagaaatcttcaactctgtgagattaatgcaaacaacacaaagaagtttctcagaatgcttctgtctagtttctatgtgaagctatatccttttccaccatagggcccaaagtgttccaaatatccaattgtagattctacaaagagaatgtttcaaaactgctcaatcaaaagaaagtttcaactctgggagatgaattcatacatcacaaagaagtttctcaggatgcttctgtccattttttagatgaagatatttcctttttcaccatagggctcaaagtgctacaaatatccatttgcagatacttaaaaagactgtttccaaactgctcaatctaaagaaaggttgaactctgttagatgaaagcacacatcacatagaagcttctcaggaactttctgtctagtttttatgtgaagatatttccaatttccccataggcttcaatgggctcccaataatccttttgcagattctacaaaacgactgtttcccaactgctgaatcaaaagaaaggttcaactctgtgagatgaatgcacacatcacaaagaagtctctcagaatgattttctctagtttttatgtgaatatacttcctttttcaccataggactcaaagtgctccaaatatccattcgtagtatctacaaaaagtctgtttccaaactgcactaacaaaacaaagtttcaattctgtgagatgaaaacacacatcacaaagtagtttctcagaatgcttctgtctagttttcatgtggagatatttcctactaccccataggcctcaataggctcacaaatatccctttacagactctacaaaacgactgtttaaaagctgctcaatcaaaaaaaatgttcaactctgtgagatgaatgcacacatcacaaataagtttctcaggatggttctctctactttttgtgtgaagatatttccttttccaacataggcctcaaagcactccaaagatcttcttgcagatttttcaataagagtgtttcaaaactgactttcttcacagaattggaaaaaaactactttaaagttcatatggaaccaaaaaagtgcccgcatcaccaagtcaatcctaggccaaaagaacaaagctggaggcatcacgctccctgacttcatactatactacaaggctacagtaaccaaaacagcatggtactggtaccaaaacagagatatagatcaatggaacaaaacagagccctcagaaataacgtcaaatatctacaactatctgatttttgacaaacctgagaaaaacaagcaatggggaaaggattccatatttaataaatggtgctgggaaaactggctaaccatatgtagaaagctgaaactgaatctcttccttacaccttatacaaaaattaattcaagatggattacagacttaaacgttagacctaaaaccataaaaaccctagcagaaaacctaggcattaccattcaggacataggcttgggcatggacttcatgtctaaaacaccaaaagcaatgacaacaaaagacaaaattgacaaatgggatctaattaaactaaagagcttctgcacagcataagaaactaccatcagactgaacaggcaacctacaaaatgggagaaaatttttgcaacctactcatctgacaaagggctaatatccagaatctacaatgaactccaacaaatttacaagaaaaaaacaaacaaccccatcaaaaagtgggcaaaggacatgaacagacacttctcaaaagaagacatttatgcagccaaaaaacacatgaaaaaatgctcaccatccctggccatcagagaagtccaaatcaaaaccacaatgggataccatctcaaaccagttagaatggcaatcattaaaaagtcaggaaacaacaggtgctggagaggatgtggagaaataggaacacttttacactgttggtgggactgtaaactagttcaaccattgtggaagtcagtgtggtgattcctcagggatctagaactagaaataccatttgacacaaccatcccattactgggtatatacccaaaggattataaatcatgctgctataaagacacatgcacacgtatgtttattgtggcactattcacagtggcaaagtcttggaaccagcccaaatgtccaacaagaatagactggattaagaaaatgtggcacatatacaccatggaatactatgcagccataaaaaatgatgagttcatgtcctttgtagagacatggatgaaattggaaatcatcattctcagtaaactatcacaaggacaaaaaaacaaacaccgcatattctcactcataggtgggaattgaacaatgagaacacatggacacaagaaggggaacatcacactctggggactgtggtgtggtggggggaggggggagagatagcattaggagatatacctaatgctaaatgaggagttaattggtgcagcacaccagcatggcacatgtatacatatgtgactaacctgcacattgcacgcatggagcttaaagcttaaaatataataataataaatttaaaaaaaataaataatagatttttttaatctgtaaaataaataaataaataaataaaaataaataaaaaattgctaaatcaaaagaaaggttcaactctgtgagatgaattcacacatcacaaagaagtttctcagaatgcttctgtctagtttttgtgtgaagatgtttcctttttcaccataggcctcaaagcactccaaatatccatcagcagatactacaaaaagactgtttccaaactgctgaatcaaaagaaaggttcaactacgtgagatgaatgcacacatcacaaagaagtttctcagaatgcttccgtctagtttttatgtgaagataattcctttttcaccatagggttcaaaacgctccaaatacccactggcagattctacaaaagagtgtttccaaactgctcaatcaaaagaaaggttcaattctgtgagatgaatgcacacatcacaaagaagtttctcagaatgcttctgcctagtttttatatgatgatatttccttcttcaccatatgccgcaacatgctcaaaatatccatttgcagattctacaaaaagactgtttccatactgctcaatcagaagaaagcttcaactctataagatgaaagcatgcatcacaaagaagtttctcagaatggttctctctagtttttatgtgaagatatttcctatttccccttaggcctcaatgggctcaaaaatatccctttgcagattctacaaaacagctgtttccaaactgctcaatcaaaagaaaggttcaactctgtgagatgaatgcacacatcacaaacgagtttctaggtatgtttctgtctagtttttatgtgaagatatttcctttttcaccataggcctcaaagcgatccaaatatccatttgcagattctataaaaagaccttttacaaactgctcaatcaaaagaaaatttcaactctgtgacatgaaagcacacatcatgaagaagtttctcagaaagattttgtctggtttttatgtgaagatgtttccatttccccatagtcctcaaagggctcacaaatatccctttgcagattctacaaaacagctgtttccaaactgctcaatcaaaagaaaggttcaactctgtgagatgaatgcacacatcacaaacgagtttctaggtatgtttctgtctagtttttatgtgaagatatttcctttttcaccataggcctcaaagcgatccaaatatccatttgcagattctataaaaagaccttttacaaactgctcaatcaaaagaaaatttcaactctgtgacatgaaagcacacatcatgaagaagtttctcagaaagattttgtctggtttttatgtgaagatgtttccatttccccatagtcctcaaagggctcacaaatatccctttgcagattctacaaaacagctgtttccaaactgctcaatcaaaagaaaggttcatctctgtgagatgaatgcacacatcacaaatgagtttctaggtatgtttctgtctagtttttatgtgaagatatttcctttttcaccataggcctcaaagcgatccaaatatccatttgcagattctataaaaagaccttttacaaactgctcaatcaaaagaaaatttcaactctgtgacatgaaagcacacatcatgaagaagtttctcagaaagattttgtctggtttttatgtgaagatgtttccatttccccatagtcctcaaagggctcacaaatatccctttgcagattctacaaaacgactgtttcaaaactgctcaatcaaaagaaatgttcaactctctgagatgaatgcacacatcacaaagcaatttctcagaatgcttctgtctattttgtatgtgaagatatttccttttccaccataggcctcaaagcactccaaatatctgcttgcagatactacaaaaagagtgtttccaaactgttcaatcaaaagaaaggttcaactctgtgagatgaatgcacacatccaaagaactttctcagagtgtttctgtctagtatttattttaagatatggcctttttcaccataggccacagagtgctctaaatatccatttgcagatcctacaaaaagactgtttccaaagtgctcaatcaaaagaaaatttccacttggtgagatgaaagcccgtatcacaaagtagtttttcagaaagtttctgtctagtttttatgtagaatctgcagagggatatttgtgagtggtttgaggcctgtggtgaaaaaggacatatcctcacataaaaactagacagaagcattttgagaaactttttcatggtgtgtgcattcatctaaccgagttgaacctttcttttgattgagcagattggaaagtctttttgtagaatctgcagagctacatatgtgagtcatttgaggcctatggtgaaaaaggaaataatttcacacaaaaactacacagaatctttctgagaaacttatttttgatgtgtgctttcatctcacagagttgaacctcttttttgactgagcagtttggaaacagtgtttttgcagaatctgcaaatggatatatggtgtgctttgaggcccatggtggaaaaggaaatatcttcaaataaaaaatagacagaaactttctgagaatctcctttgtgatctgtgctttcacatcactgagttgaaacattcttttcatggaggagttttgaaacagtctttttgaagaatctgcaaagggatatttgtgaccagtttgaggcctatggtgaaaaaggaaatatcttcacacaaaaactaggcagaagtttttgagaaacttctttgtgatgcttgcattgacctcacagagttgaacctttcttttcattgagcagtttggaaacagtctttttgaagaatgtgcagagggatacttgtttagccgttttaggcctatggtgaaaaaggaaatatcttcccagaaaaactagacaaaagatttttgagaaacttctttgtgacttgtgcattcatctcacagatttgaagctttctgttgattgagcagtttggaaagagtctttttgtagaatctgtaaagggatatttttgagaccattgaggcctatggtgaaataggaaacatctttacataaaaacaagacagaagctttctgagaaacttctttttgttgggtgctttcatctcacagagttgaacctttctttttattgagcagtttggatatagtctttttatagaatctgaaaatggatatttggagtgctttgaggcctatggtgaaaaaggaaatgtcttcacataaaaactagagagaaacattctgagaaacttctttgtgatgtgtgcttacatttcacagatttgaacctttcttttcattgagcagtttggaaataatctttttgtagaatctgcaaatggatatttgtgagcggtttgaggcataccgtgaaagaggaaatatcttcacataaaaactggagagtagcttttgagaaacttctgagtgatgtttgtattcatctcacagaattgaacttgtcttttcattgagcagtttggaaacagtctttctgtacaatctgcaaagggatgtttctgagagttttgaagcctatggtgaaaaagaactattttcatgtaaaaattagaccgaagatttcagagaaatttcattttgatgtgtgctttcatctcacagagttcagcatttcttttgattgagctgtttggaaagtctttttgtagaatctgcaaatggatatttggtgtgctttgacgcctatggtgaaaaaggaaatatcttcacataaaaactagacagaagatctctgagtaacttatttgtaatgtgtccattcatctcacagacttgaaactttcttttgattgagcagtttagaaaccgtctttttgtagattatgcagcagaatagttgtgagaggattgatgcctattgtgtaaaaggaaatatcttcacataaaaactagaaagaaactttctgagaaacttctttgtgatgtgtgcattcatctcagagggttgagcgtttcttttgattgagcactttggaaacagtctgtttctacaatctgcaaagggatatttctgagtggtttgaggcctatggtgaaaaagaagtatcctcatataaaaactagatagcagcattctcagaaactactatgtgatgtgtgcattcatctcacagtgttgaaaatttattttgattgagcagtttgcaaacagcttttttgtggactctgcaaagggatatttgttagcccattgaggactatggtgaaataggaaatatcttcacctaaaaactagacagaatctttttaagaaacttccttgtgatgagtgctttcatctcatcgaattgaacatttttttcattgagcagtttggaaacagtctttttgtagtatctgcaaagggatatttgtgagtggttgaggcctatggtgaaaaaggaaatatcttcacgtaaaaactagatagaagctttttgagaaacttctttgtgatgtttgcattcatctcacagaattgaacctgtcttttcatagagcagtttggaaacactctttttgtacaatctcaaatagatatttctgcacgtcttgaggcctatggtgaaaaagaaatatcttcacaaaaactagacagaaactttcagagaaacttcactgtgatgtgtgctttattatcacacagacgaacctttcttttgattgagcagtttggaaacagtctttttgaagtttatgcagagagatatttgtgagcagtttgatgtctatggtgtaaaaggaaatatcttcacataaaaattagacagaagttttctgataaacttctttgtgatgtgtgcattcatatcacagaggtgaacctttgttttgattgagcagtttggaaacaatctttttctacactctgcaaagggatatttctgagcaatttgaggcctatggtgaaaaagaagtattatcacataaaaactagaaagaagcattctgagaaacttttttgtgatgtgtgcattcatcgaacagagttgaaaatttcttttgattgagcagttttgaaacggtgtttttgtggaatctgcaaagggatatttgttagcccattcaggcctacagtgaaataggaaatattttcacataaaaacttgacagaaaatttctgagaaacttccttgtaatgtgtgatgtcatctaacatagttaaacctttcttttgattgatcactttggaaacagtctttttgtagaatctgcaaatggatatttggagtgctttgaggcctatagtgaaaacggaagcatattcacataaaaactagacagaagctttgtgagaaaattttctgtgatgggtgcattcacctcacagagttgaacgtttgttttgaatgagcagtttggaaacagtctgtttgtagaatcggcaaattgatatttttgagccatttgaggtatatggtgaaaaaggaaacaacttcacataaaaactagacagaagttttctgagaaacttctttgtgatgtgtgcattaatctcaccatgttcaacctttcttttgagtgagcagtttggaaacaatctttttatagactctgcaaaggtatatttgtgagcccattgaggcctatggtgtaacaggaaatatcttcacataaaaactagagagaagcattctgagaaaccactttgtgatgtgtcctttcatcacacagagttgaacctttccgttgattgagcagtttggaaacagtctttttgtagaatctgcaaatggatatttggagaactttgaggtctacggtgaaaagggaaacatcttcacaaaaaaactagacagaaactttctgagaaacttctttgtgatgtgtgctttcatctcacagggttgaaacattcatttcattgagcagtttggaaagtctttttgtagaatctgcaaagggatagttttgagctcaatgaggcctatggtgaaacaggaaataccttcacataaaaacaagacagaagctttctgagacacttctttgtgatgtgtgcttttatctcacagatttcaaactttattttgattgagaagtttggaaacagtatttttgtagaacctgcaagtgaatatttggagcacttcgaggcctatagtgaaaaaggaaatatcttcacataaaaaccagacagaacatttgtgagaaagttctttgtggtaggtgcattcatatcacgaagttgaacgtttcctttgattgagcactttggatatagtctgtttgtagagtctacaaagggatgtttgtgaatattttaaggcctgtgttgaaaaagtaaatatcttcacatataaactagacagaagaattctgagaaacttctttgtgatgtgtgcattcatctcacagagttgaacctttcttttgattcagcagtttagaaagagtttttttgtagaatctggaaatggatatttggttcactttgaggcctatggttaaaaaggaaatatcttcacataaaaactacacacaaactttctgagaaacttctttgtgatgtgtgcttcatctcactgggttgagcctgtcattttttttttattattatactttaagttctagggtacatgtgcacattgtgcaggtgagttacatatgtatacaagtgccactctggtgtgctgcacccactaactcgtcatctagcattaggtatatctctcaatgctatccctccccactcaccccaccccacaacagtccccagagtgtgatgttccccttcttgtgtccatgtgatctcatttttccattcccacctatgagtgagaatatgcggtttttgtttttttgtccttgcgatagtttactgagaatgatgatttccaatttcatccatgtccctacaaaggacatgaactcatcattttttatggctgcatagtattccatggtgtatatgtgccacattttgttaatccagtctatcattgttggacatttgggttggttccaagtctttgctattgtgaatagtgccgcaataaacatacgtgttcatgtgtctttatagcagcatgatttatagtcctttgggtatatacccaggaatggggtggctgggtcaaatggttattccagttctagatccctgaggaatcaccacactgacttccacaatggttgaactagtttacagtcccaccaacagtgtaaaagtgttcctatttctccacatcctctccagcacctgttgtttcctgactttttaatgactgccattctaaatggtgtgagatggtatcccattgtggttttgatttgcatttctctgatggccagtgatgatgagcattttttcatgtgttttttggctgcataaatatcttcttttgagaagtgtctgttcatgtccttcacccactttttgatggggttgtttgtttttttcttgtaaatttgttggagttcattgtagattctggatattagccctttgtccgatgagtaggttgcgaaaattttctcccattttgtaggttgcctgttcactctgatggtagtttcttatgctgtgcagaagctctttagtttaattagatcccatttgtcaattttgtcttttgttgtcattgcttttggtgttttagacatgaagtccttgcccatgcctatgtcctgaatggtaatgcctaggttttcttctagggtttttatggttttaggtctaacatttaagtctttaatccatcttgaattgatttttgtataaggtgtaaggaagggatccagtttcagctttctacatatggctagccagttttcccagcaccatttattaaatatggaatcctttccccattgcttgtttttctcaggtttgtcaaagatcagatagttgtagatatgttttgttatttgagaattttagacgaatatccttgatgaacattgatgcaataatcctcaataaaatactggcaaacccaatccagcagcacatcaaaaagcttattcaccttgatcaagtgggcttcatccctgggatgcaaggctggttcaatatacacaaatcaataaatgtaattcagcatataagcagagccaaagacaaaaaccacatgatcatctcaatagattcagaaaagacctttgacaaaattcaacaacgcttcatgccaaaaactctcaataaattaggtattgatgggacatatctcaaaataataagagctatctatgacaaacccacagccaatatcatactgaatgggcaaaaactggaagcattccctttgaaaattggcacaagacagggatgccctctctcaccactcctattcaacatagtgttggaagttctcgccaaggcaattaggcaggagaaggaaataaagggtattcaattaggaaaagaggaagtcaaattgtccccctgtttgcagatgacatgattgtatatctagaaaaccccattgtctcagcccaaaatctccttaagctgataagcaacttcagcaaagtctcacaatacaaaatcaatgtacaaaaatcacaagcattcttatacaccaacaacagacaaacagagagccaaatcatgagtgaactcccattcacaattgcttcaaagagaataaaatacctaggaatccaacttacaagggatgtgaaggacctcttcaaggagaactacaaaccactgctcaaggaaataaaagaggatacaaacaaatggaagtacattccatgctcatggttaggaagaatcaatatcgtgaaaatggccatactgcccaaggtaatttatagattcaatgccatccccatcaagctaccaatgactttcttcaaagaattggaaaaaactactttaaagttcatatggaaccaaaaaggagcccgcatcgcgaagtcaatcctgagccaaaagaacaaagctggaggcatcacactacctgacttcaaactatactacaaggctacagtaaccaaaacagcatggtactggtaccaaaacagagatatagatcaatggaacagaacagagcctgtcttttcgttgagcagtttggaaacagtctttttgaagaatctgcaaaggggtatttgtgagctctttgaagcctatgttggaaaaggaaatatcttcacataaaaactagacagaagctttttgagaaacttatttttgatgtttgcattcacctcacagagttgaaactttcttttctttgagcagtttgaaaatatcttgtgtgcaatctgccaacgcataacttggagtggtttgagcctatggtgtaaaagaaatatcttcacatgaaaactagacagaaccattcagagaaacttcactgtgatgagcattcatctgacagaattgaacctttcttttgattgggcagtttggaaacagtctttttcctgtatttgcaaagagatatttgtgaggcctttgaggcctaaggtgaaataggatatttcttcacataaaaactagacagaagatttctgataaacttctttgtgatgtgggcatttatcttgcagggttgaaactttcttttgattgagcagtttggaaacagtctttttgtagaatatgtagagggatatttgtgagtgctttgaggcctatggtgcaaatggaaatatctacacataaaaactagacaatagctttctaggaaacgtctttgtgatgtgtgcattcatctcacatagttgaaaatttcttttgattgagcagtttggaaacagtctttttgtagaatctccaaaggtatatttctgaattctatgatgcctacagtgaaaaaggaaatatcttcacataaaaactagacagaagcattctgagaaactctttcggatgtgtgcatttatctcacagtgttgaacctttcctttgattgagcagtttggaaaccgtatttttgtagtatctgcaaatggatatttggtgtgctttgaagcctatggttgaaaaggaaatatcttcacataaaaactaggcagaggcactctgaaaaaacttctttgtgatgtgtgcattcatagcaatgagttgaacctttctttttattcagcagtttagaaacagtcttttttgtaaaatctccaaagggtgatttgtgagtcctttgaggccaatggagaaaaaggaaatatattcacataaaaactcgacagaaggtttctgagaaactgcttgtgaagtgtgtattcatctcacaaagttgaacctttcttttgattgagcagtttggaaaccatctttgtgtagaatctgcaaagggatatttgtgagccctttgagacctatggtgaaaaaggaaatatcttcacataaaaactagatagaagctttctgagaaacttctttgtgatatgtgctttcaccttacagaggcgaaaatttcttttgattgagcactttggaaacagtcttttagtagaatctgcaaagggatatttgtgagccctttgaggcctatggtggaaaaggaattatctttacataataactagacagaaggtttatgataacctgatttgtgatgtgtgcattcatctcaaggggtaaacgtttcttttctttgagcagattggaaactctgctcttgcagaatcttcaaagggatatttgtgagcccttttattcctatggtgaaaaagtagatagctttacataaaaactagacagaaactttctgagaaacttctttgtgatgtgtgcattcatctcacagacttgaagctacttttgagtgagcagtttggaaactgtcttttcatagtaactgcaaaggtatgtttgtgagatctttgaggcctatggagaaaaaggaaatatcttcacataaaactagacagaaagtttgtgagaaactgctttctgatgtgtgcattcatctcacagagttgaataattcctttgattgagcagtttggaagcaatcttttcgtagaatctacaaaaggatatttgtgagccctttgaggcctgtggtgataatggaaatattttcacataaaaactagacagcatctgagaaacaaatttgtgatgtgtgcattcatctcacactgttgaaactttcttctgattgtgtagtttggaatcatactttatgtagaatctgcaaagggatatttgtgatccctttgaggcctatggggaaataggaactatcttcacataaaaactagacagaaggtttaggagaaactggtttgtgatgtgtgcattcatctcacagttttaaactctttctttctttgagcagattggaatctctgttcttatagaatctgcaaagggaaattggtgagtgctttgaggccagtagtgaaaaaggaaatatcttcacataaaaactagacagaagctttctgagaaacttctttgtgatatgtgcattcatgtcacagaattgaacgtattttgattgagcagtttggaaacactctttttgaagaatctgcaaggggatgtttgtgagcggtttgagatctatgatgaaaaaggaaatacctttacctaaaaactagacagaaaccttctgagaaacttctttctgatgtgtgcattcatctcatggaggtaaacgtttcttttcattgagcagattgcaaaccctgttcttgtagaatctgcaaaggtgtgtttgtgagacctttgaagcctgtggtgtaaaaggaaatatcttcatataaaaagtagacagatgctttctgagaaacttccctgtgatgtgtgctctcatctcacagagttgaacctttcttttaattgagcagattgtaaaaagtgtttttgtagaatcttcaaagggctatctgtaacgctttgtggcctatggtgaaaaaggaagtatattcacataaaaacaggacagaagcattctgagaagcttctttgtgatatgggcattcatctcgtatagttgaacctttcttttgattgagcagtttagaaagtctttttgtagaatctgcaaagggatatttatgagtggtttgaggcctatggtgaaaaaggaaatatctacacatcaaaactagagaggagttttctgagaaactgcgtagtgatgtgtgccttcatctcacagaggtaaatggtactttttattgagcagattggaaaccctgtacttgtataatctgcaaagtgatatttgtgagtgctttgaggtatatagcagaaaaggaaatattttcacataaaaagtactcagatgttttctgagaaacttccttgtgatgtatgcattcatctcacagagttgaacctttgttttgattaaggtgattggaaaaagtatttttgtaaaatctgccaatgtatatatgtgagcactttgtggcctatgttgaaaaaggaaatatcttcacataaaaactggagagaaggtttatgagaaactgctttgtgatgtatgcattcatctaatagcattgaattttctttttattgagcattttgagaaaagtctttggttagaatctgccaagggatatttgttagcactttgagctgtacggtgaaaaagagaatatcttcacataagaactagacagaagccttctgagaaactgctttgtgatgtttgcattcatctcacaatattgaacctttcttttgattgagcagtttggaagctgtctttttgtagaatctgcaaagggaaatttgtgatcgcttagaagactatggtgaaaaaggaaatatcttcacataaaaactagacagaagctttctgagaaacttctctgtaatgtgtgcattcatagcacagagttgaaccttttgtttgattgagcagtttgtaaacagtctttttgttgaatctgcaaggggataatcagagtgctttgaggcctatggtgaaaaaggaaatatcttcacataaaaactacacagaatcattctgagaaacttctttgtgatgggtgcatttatctcccagagttaaacgtttcttttgattgagcagtttggaaacagtctttttgttgaatctgcaagggaatatttatagcgctctggggcctatggtgaaaaaggaagtaacctcacttaaaaactagacagaagctttctgagaaactgttttgtgatgtgtgcattcatctcacagagttgaaactttcttttcattgagcattttggaaacaatcttttgtagaatctgcaaagggatatttggtgcactttgaggactgtggtgagaaaggaaatatcttcatataaaaactagacagaagcattctgggaaacatctctgtgatgtgtctattcaactcagagagttgaaactttcttttgattgagcagtttggaaagagtctttctatagaatctgcaaggggatatttttgagtcctttgaggtctatggtgaaaaaggaaaaatcttcacttaaaaactaggcagaaggtttctgagagactgcttcatgatgtgtgcatccatctctcagaagtaaacttttctttccattgacaatattggatactctgttcctgtagaattcgcagagggatatttgtgactgctttgaggcctacggtggaaaaggaaatatcttcacagaaatactagacagaagctttctgagaaactactttgtgatgtgtgcattcgtctcacacagttgaaactttcctttgattgagcagtatggaaaaagcctccttgcagggtctacaaagggatatttgtgagcagtttaagaactatggtgaaaaaggaattatgttctcataaaaactggacagaagcttttggagaaacttctttgtaatgcgtgtattcatctcacagagttgaaactttattttgattgagcagtttggaaaccgtctttttgtagaatcagcaaatggatatttatgagggccttgaggtctcaggtaagaaaaggaaatatcttcacataaaaactagacagaaggttcctgagaaactgttttcagatgtgtgccttcatctcacagaggtaaatgtttcttttcattgagcagattggaaactctcttttttgagaatctgcaagggaatattagtgagtggtttgaggcctattgtgaaaaaggaaatattttcacataaaaattaggcagaagctttcagagaaacttctttgtgatgtgtgcattcatctcacagatttgaacctttcttttgattgagcagtttggaaacattctttttgtagaatctgcaaagggatatttgtgagcactttgaggcttttggtgcaaaaaaggaaatatcttcatatgaaaactagacagaatttttctgagaaactgctttgtgatgcgtgcattcatctcacagagttgaaactttcttttgattgaacagtttggaaacagtctttttgtagaatctgccaagggatatttgtgagcgctttgaggcctatggtgaaaaaggaaatatcttcacataaaaactatacagaagctttctggaaaacttctttttgatgtgtgtattcatctcatgaagttgaactgtcttttgattgatcagtttagaaacagtctttctgtagtatctgcaaagggatatttgtgagggccttgaggcccatattgagaaaggaaatatcctcatataaaaactagacagaaggtttctgagtaactgctttgtgatgtgtgcattcatctcacacaagtaaacatttcttttcattgagcagattggaaactctgttcttgtagaatctgcaaagggatatttgaggaagttttgatgcctggggtgaaaaaggaaatatcttcatatgaaaacgagacagaagctttcagagaaacttctttgtgatgtatgcattcgtctcacacagttgaaccttggttttgattgagcattttggaaacgtctttttgcagaatctgcaaagagatatttttgagggccttgaggtctatggtaaaaaaaggaaatatcttcacataaaaactaaacagaagttttctgagaaagtgctttgtgatgtgtgctttcatctccagaggtaaatgtttattttcattgagccagttggaaactctgatctttgagaatctgcaaggggatatttctgagtggtttgaggcctattgtgaaaaaggaaatattttcatataaaaactagaccgaagctttctgagaaacttctttgtgatgtgttcattcatctcacagagttgaacctttcttttgattgtacagtttggaaacagtctttttgtagaatctgcaaaagtgtatttgggaaccctttgaggcatatgttgaaaaaggaaatatcttcacataaaaactagacagaagctttcttagagactgctacattttgtgggcatgcatctcacagaggtagaaatttcttttcattgagctgattggaaaccttcctcatatagtatctgcaaagggatatttgtgaccgcttttaggccagtggtgaaaaaggaaatgtcttcacataaatctagacagacgcattctgagaaacttctttgagatgtgtgcattcatctcatggagttgaacctttcttttgattgagcagtttggaaacagtcagtttgtagaatctgtaaagtgatatttgtgagcagtttgaagcgtatggtgaaaaagaaaaaatcttcccataaaaactagataggagaattctgagaaactgctttgttatgtgtgcattcatctcaaagatttgaaccctccgtttggttgagcagtttggaaacagcatttttgtagagtatgcaaagggatatttgtgagtcattggagtcctgtggtgaaaaaggaaaatcttcatatgaaaacaagacaaaggctttctgaaaaactgcttgtgatgtgtccattcatctcacatagttgaaactttcttttgaatgactagtttggaaacagtcataactgtctttttgtagaatctgcaaagggatatttgtgagtgctttgatgcctgtggtgaaaaaggaaatatcttcacataaaaaaatagaagatttccgagaaacttctttgtgatgtgtgcattcatctcacagagttgaatctttcttttgattgagcagtttggaaacagtctttttgtagaatctccaaagggatatttttcaaccctttgaggtctatggtgaaaaaggaaatatcttcacataaaaaatagacagaatgtttctgagagactgtttcatgatgagggcattcatctcaaagaggtaattatttcttttcattgagcagattggaaactctcttcttgtataatctgcaaagggatatttttgactgctttgagacctgtggtgaaaaaggaaatatcttcacataaaaactagacagaagctttctgggaaatggctttctgatgtgtgcattcatctcactgagttgaaactttcttttgattgaggagtttggaagagtcttttcatagaatctgcatagggatatttgtgattggtttgaggcctacggtgaaaaaggaaatatcttcacataaaaactagacagaagctttctgagaaacttctttgtgatgcttggattcatctcatagaattgaaactttcttttgattgatcagtttggaaagactctttttgtagagtctgtaaagggatatttgtgagctgtttgagtcctgtggtgaaaaggaaaataacttcatatgaaaactaaatagaatctttctgagaaaatgctttgtgatgtgtgcattcatctcacagagttgaaactttcttttgattgagcagtttggaaacagtctttttatagaatctgcaaaggcatatttgtgagcagtttgaggcctatggtgaaaaaggaaatatcttcacataaaaactacacagaatccttctgagaaacttctttgtgatgtgtgcattcatctcaaagagttgaacctttcttttgattaagcagtttggaggcattcttcttgtagtatctccaaaggtatatttgtgagtgctttgaggcctatggtgaaaaaggaaatatcttcacataaaaactagacagaagctttatgagaaacttctttgtgatatgtgcattcatctcacagttgaaattttcttttgaatgaatagtttggaaagtgtctttttgtagaatgtgcaaagggatatttatgagccctttgaggcctatggcaaaaaaggaaatatcttcaaataaaaattagacagaatgtttctcagaaactgcttcatgacatgggcattcatttcacagaggtaaacgtttcttttcattgagtagattggaacctctcttcttctagagtctgcaaagggatgtttgtgagcactttgaggcctattgtgaaaaaggaaatattttcacatgaaaactagacagaagctttctgagaaactactttctgatgtgtacattcatctgaaatagttgaacatttcttttgattgagcagtttggaagcactctttttgtagaatctgcaaagagatatttttgagcactttcaggcctattatgaaaaaggaaatatcttcacataaaaactagacagaagctttctgagaaaattctctgtgatgtgtgaattcatctcacatagctgagactttcttttgattgtcaatttggcaaaagtgtttttgtagcatctgcaaacggatatttgtgggctgtttgaggcctatggtgaaaaaggaaatgtcttcacataagaactagacagaagatttctgagagactgcttcatgatgttggcattcatcccacaaaggtagacattacttttcattgggcagatttgaaaccctcttcttgtagaatccacaaagttagatttgggaccactttcagtctgtggtgaaaaactaaatatcttcaaataaaaaccagacagaagcttactgagaaactgatttgtgatgtgtgcattcatctcacacagttgaaactttcttttgattgagcagtttggaaacagtctttttgtagagtctgtaaagggatatctgtgagtggtttgaggcatatggttaaaaatgaaatatcttcacataaacctagacagaaattttgtgagaaactgctttgtgatgtgtgcattaatctcaaagagttgaaactttcttttgattgagcagtgtggaaacagccttttcatagaatttccaaggggatatttgtgagccctttgaagcctatggtgaaaaaggaaatatattcacatgaaaactagacagaaggtttctgggagactgctttgggatgtgggcaatcgtctcacagaggtaaacatttattttcactgagcagattggaaactctcttgtggtatctgccaagggatatttgtgaccactttgaggcctgtggtgaaaaaggaaatatcttcacataaaaactaggcagaagctttctgagaaacttctttgtgatgcccgcattcatctcacagagttgaaactttcttttgattgatcattttggaaacagtctttttgtagaatctgtaaaggaatatttgtgagtggtttgagtcctatggtgaaaaaggaaaaatcttcacttcaaaaaatagacagaagatttctgagaaacttctctgtgatgtatgcattcatcccacagaggttaatctttctttcaattaagcagtttggaaacagcctttttgtagcatctgcaaagggatatttgtgagccctttgaggcctatggtcaaaagggaaataacttcctatgaaaactagacagaatctttctgagaaactgctttgtgatgtgtgcattcatctcacagagttgaaacttttttttttggttgagcagtttggaaacattctttttgtagatctgcaaagtgttatgtttgagcagtttgaggccaatggtgataaaggaaatatcttcccatcaaaactagacagaagctttctgagaaacttctttgtgatgtctacattcatctcagagagttgaagctttcttttgattgagcatttatggaaaaagtatttttgtagaatctgtagagggatatttgtagcaacttgaggcctatggtgaaaaaggaaatctcttcacattaaaactagacagaaggtttctcagagactgcttcatgatgtgggcattcatctcacagaggtagatatttcttttcattgagcagattggaaaccctcttcatgaagtatccgcaaagggatatttgtgaacactttgtggcctatggtgaaaaaggtaatatcttcacataaaaactagacagaagcattctgagacacttctttgtaatgtgtgcattcaactcacagacttgaacgtttcttttgattgagcagcttggaaacagtctttttgtagaatctgtaaagggatatttggagcaatttcaggcctatggtgaaaaaggaaatatcttcacacaaaaagtagacagaatggttctgacagactgcttagtgatgagggcattcatctcaaagaggtaaagatttcttttcattgaacatattggaaactctcttcttgtagaatctgcaatgggatatttgtgactgctttgaatcctgtggtgaaaaaggaaatatcttcacataaaaactagacagacgcattcttggaaactgctttctgatgtgtacattcatctcacagatttgaacctttctttcgatggagcagtttggaagagtcttcttgtagaatctacatagggatatttgtgagcaatttgaggcctgtggtgagaaaggaaatatcttcacataaaaactagacagaagttttcagagaaacttcattgtgatgtgtgcactaatctgacagagatgaacctttcttttgattgagcagtttggaaagaatctttttctagagcctgcaaagggatatttgtgagcactttgaagcctgtggtggaaaaggaaatatcttcacataaaaattcgacagaagctttctgagaaacttctttgttatgtgtgcattcatttcacagaggtaagcattccttttccttgggaagatttgaagctcttttcttttagaatcgaaggggatatttgtgagcgctttgagacctacagtgaaaaaggaaatatcttcacataaaaactacatagaatctttctgagaaacttctttgtgatgtgtgcattcatctcacagatttgaaccttccttttgattgagcagtttggagactgtcataacagtctttttgtagaatctgcaaggggatatttgtgagtggtttgaggtctagggtgaaaaaggaaatatcttcacatgaaaactagatagaaggtttctgagaaatttctttgtgatgtgtgcatttttctcaaagtgttgaaccattcttttgattgagcagtttggaaaaagtctttttgtagcatctgcaaagggacatttgtgagcactttgaggtctgtggtgaaaaaggaaatatattcccataaaaactagacagaagatttctgagaaacttcattgtgatgcctgcattcatctcacagagttgaaactttcttttgattaatcagtttggaaacagtcattttgcagaagctgtaaagggatatttgtgagtggtttgagtcctatggtgaaaaaggaaaaatcttcacataaaaaccagacagaagatttctgagaaacttctttgtgatgtggcatttatcccacagagtgaacctttctttcagttaagcagtttggaaacagcctttttgttggatctgcaaagggatatttgtgagccctttgaggccattgctgaaaagggaaataacttcataggaaaactagacagaatctttctgagaaactgctttgtgatgtgtgcattcatctgacagagtggaaactttcttttgattgggcagtttggaaacattatttttgtagaatctgcaaagtgttatttgtgaacggttttaggcctacggtgaaaaaggaaatatcttcatataaaaactaggcagaagctttctgcaaaacttttttgtggtatgtgcattcatctcacagagttgaaactttcttttgattgaatagtttggaaagcgtctttttgtagaatctgcaaagggatatttgtgattgctttgaggcctatggtgaataaggaaatatcttcatataaaaactagacagaaggttactgagaagctggttcatgatgtgggcattcatctcacagaagtaaacgtttcttttcattgagcagataggaaactctgatcttgtagtatctgcaaagggagatttgtgaggactttgaggcatatgatgaaaaagaaaatatcgtcacataaaaattaggcagtagcttcatgagaaacttctttgtgatgtgtgcatttatcacacagagttgaacctctctttgcattgagcagtttgcaaaagtacttttgtagaatctgcaaagggatatctttgagcgctttgaggcttatggtgaaaaaggaaataacttcacataaaaacgagacagaagatttctgagaaacttctttgtattgtgtgcagccatctcacagtgtttaacttctgttttcatggagcagtttggaaacagtatttttgtagaatctgcaaagggatatttctgagcgctttgagtcctatggtgaaaaaggaaatatcttcacgtggaaactagacagaagttttctgagaaacttctttgtgatgtgtgcactcatctcacggagttgaacctttcttttgattgaatagtttggaaatagtcctattgtcgaatgtacaaagggatatttgtgagcgcttggagggctgtgggaaaaaaaggaaatatcttcatataaaaactagaaagaagctttttgtgaaactattttgtgatttgtgcattcatgttacagagctgaatatttcccttgatggagcagcttggaaacagtcttcggatactctgtatggggatatttgtctgccctttgaggcctgttttgaaaaagtatatatcttcacatgaaaactcgataaaagatttctgaaaaactgatttgtgatgtgtgcattcatctcacagagttgaacctttctttttattgagcagtttggaaacagtctttttgtggaatctgcaaaggcatatttgtgagcactttgaggcctagggtgaaaaaggaaatatcttcacatgaaaaccagacagaagctttctgagaaacttctttgtgatgtgtgcattcagctcacagtgttgaacttttcttttgattgagcagtttggaaaacatctttttgtagtatctgcatagggatatttgtgagtggtttgaggactatggtgaaaaaggaaatacctacacataaaaactagactggacctttcagagaaacttcttcatgctgtgttcattcatctcacagggttgaaactttcttttgattgagcattttggaaacagtctttttgtagaatctgcaaagggatatttgtgagccctttgtggtctatgcagaaaaagaatatatcttcacatgaaaactagatagaaggtttctgagaaatttctttgtgatgtgtgcatttttctcagagttgaaccattattttgattgagcagtttagaaaaagtctttttgtagcatctgcaaagggatgtttgtgagcactttgaggtctatgttgaaaaaggaaatatcttcacataaaaactagacataatatttctgagagactgcttaatgatgtgggcattcatctcatagaggtagacattacttctcattgagcagattggaaaccctcttcttgtagaatccacagagggagatttgtgaccgccctcaggcctgtggtgaaaaaggtaatatcttcacataaaaactagatagtagcattctgagacacttctttgtgatgtgtgcattcatctcacagagttgaacctttcttttggttgagcagtttggaaacagtctttttgtagaatctgtaaagggatatttttgagcggtttgaggcctatggtgaaaaatgaaatatcttcacataaaaaccatacagaagttttctgaggaactgctttgtgatgtgcattaatctcacagagttgaacatttcttttgattaagtagtttggaaacagtgtttctgtagaatctgcaaagggatatttgtgagtggtaggaggcctaaggtgaaaaaggaaatatcttcacataaaaactagagagaagctttctgagaaacttctttgtgatgtgtgcattcatctcacataattgaaccttttttttgattgagcagattggaaacagtcatagcagtctttttgtagaatctgcaaagggatatttgtgatcgctttgaggcctatggtggaaaaggaaatatattcatgtagaaactacccagaatctttctgagaaactactttttgatgtgtgcattcatctcacagagttgaacctttgtttttattgagaagtttggaaattgtcattaccatcttttggtagaatctgaaaagggatatttttgagcggtttgagtcctgtgtgaaaagggaaataacttcatataaaaactagacagaagctttctgagaaacttctttgtgatgtgtgcattcatctcaaagggttaaacctttcttttgattaagcagtttggagacattctttttgtagtatctccaaaggtgtatttttgagtgctttgaggcctatggtgaaaaaggaaatatcttcacatgaaaactaaatggaagctttctgagaaacttctttgtgatatgtgcattcatctcacagatttgaaactttcttttgattgaatagttcagaaagtgtctttttgtagaatctgcaaagggatatttttgagccctttgacgtctatggcaaaaaaggaaatatcttcacataaaaattagacaaaatatttctcagaaactgcttcatgacataggcattcatctcacagaggtaaacgtttcttttcattgagcagattggaaactctcttcttctggattctgcaaagagatatttgcgagtgctctaaggcctatggtgaaaaaggaaatatcttcacatgaaaactagacagaagctttctgagaaactactttgtgatgtgtacattcatctcaaatagttaaagctttcttttgattgagcagtttggaaacactctttttatagaatctgcaaaggtatatttgtgagcactttgaagcctattatgaaagaggaaatatcttcaaatgaaaactaggcagaagctttctgagaaccttctttgtgatgtgtgaattcatctcacatagttgaatttttcttttgattgagcaatttcgaaaaagtgtttttgtagcatctgcaaatggatatttgtgagccctttgaggccgatggtgaaaaaggaaatatctaaacataagaactaggcagaaggtttctgagagactgcttcttgatgtgggcattcatgtcacagaggtagacattacttttcattgagcagattggaaaccctcttcttgtagaatccgcaaagttagatttgggactgctttcaggcctgtggcgaaaaaggaaatatcatcacataaaaaccagacagaagctttcacaaaaacttctttgtgatgtatgcattaatctcaaagtgttgaaacttcctattgattgagcactgtggaaacagttattttgtagaatctgcaaagggatatttgtgagctctttgaggcctatggtgaaaaaggaaatatcttcacttgaaaactagacagaagatgtctaagagactgcttcgtgatgtgggcattcatctcacagaggtaaacatttcttttcaactctcttcttgtagtatccacaaagggatatttgtgaccgttctgaggcctgttttgaaaaaggatatatcttcacataaaaactaggcaggaggtttctaagagactgctttttgatgcgtgcatccacctcacacaggtaaatgtctcttatcattgagtagattggaaactcttttcttacagaatctgcaaagggatatttttgagcacttggaggcctatggtgaaaaagtaaatatcttcacataaaaactacaaagaatctttctgagaaacttccttgtgatgtgtgcattcagctcacagagttgaacctttcttttgattgagcagattggaaacagtcataacagtccttgtagaatctgcaaaggaatagttgtgagcgctttgaggcctatggtgaaatagaaaatatcttcacataaaaactagacagaagattcctgaaaaactcctttgagctgtgtgcatttatcccacagagttgaacctttctttccgttgagcagtttggaaacagtctttttgtagaatctgcaaggggatatttgtgagcgcttgagacctatggtgaaaaagacctatcttcacataaaaaccagaaagaaggattctgagagactgcttcctgatgtgagcattcgtctcacagaggtaaacatttcttttcactgagcagattggaaactctcttcttgtagtatccacaaagggatatttgtgaccactttgaggcctgtggtgaaaagggaaatatattcccataaaaactagacagaagatttctgagaaacttcattgtgatgcctgcattcatctcacagagttgaaactttcttttgattaatcagtttggaaacagtctttttgcagaagctgtaaagggatatttgtgagtggtttgagtcctatggtgaaaaaggaaaaatcttcacataaaaaccagacagaagatttctgagaaacttctttgtgatgtggcatttatcccacagaggtgaacttttctttcaattaagcagtttggaaacagcctttttgttggatctgcaaagggatatttgtgagccctttgaggccattgctgaaaagggaaataacttcataggaaaactagacagaatctttctgagaaactgctttgtgatgtgtgcattcatctgacagagtggaaactttcttttggttgagcagtttggaaacattatttttgtagaatctgcaaagggatatttgtgtgtggtttgatgcctatggtgaaaaataaaatatcttcacataaaaactagaaaggagctttctgagaaacttctttgtgacgtgcgcattcatctcacagagttgaaactttctatggattgagcagtttgaaaacagtctttgtgtagaatctacaaagcgatatttgtgagcttgttgagacctatggtgaaaaaggaaatatcttcatataaaaaccagacagaagctttctgagatacttccttgagatgtgtgcattcatctcactaaatagaaccttgagtagtttgtaaacagtctttttgtagaatctgcaatccgatatttgtgagcccttggtggcctatggtgaaaaaggatatacattcacataaaaactaggcagaaggcttctgagaatctgatttgtgatgtgtgcattcatctgacagaggtaaatgtttcttttcattgatcagatgggaaactctcttcttgtagaatctgcaatgagatacttgtgagtgctttgaagcctatggtgaaaaagtaaatatcttcacataaaaagtagacaaaagctttttgagaaacttctttgtgatatgtgctttcatctcacacagttcaaactttcttttgattgagcagtttggaaaaaatctttttgtagaaaatgcaaagggatatttgtgagtggcttgaggcctatggatggaaaggaaatatcttcacataaatactagacagaagctttctgagaaacttctttgtgatgtgcacattcatctcacagacgtaaacctttcttttcattgtggagattgtaaactctgttcttgcagtatctggaaagggatatttctgagcgctttgaggcctgtggtgaaaaaggaaatatcttcacataaaaagtagacagaagctttctgagaaacttctttgtgaaatgtgcatacatctcacagagttgagcctttcctttgactgagcagtttggaaacagtctttttgtagaatcttcaaagggatatttgcgaacactttgaggtctatagtgaaaaaggaaatatcttcacataaaaactagagagaagtatactgagaaactgctttgaaatctgtgcattcatctcacagaggttaacctttctttacattgagcagattggatattatgttcttatagaatctgaaaaggcatatttttgagtgctttgagtcgtatggttaaaaaggaaatatcttcacataaaaactagacagaaactttctgagaaacttctttgtgatatgtgcactcatctcacagagttgaacctttctgagtagtttgaaaatagtcttattgtcgaatctgcaaagggatacttctgagtgcttggagggctgtggtgaaaaaggaaatatcttcatataaaagctagaaagaagttttctgtaaaacttttttgtgatttgtgcattcatctcacagaggtgaacaattcccttgagggaaaagtttggaagcagtctttttggagaatctgcatagggatatttgtctgccctttgaggtctgttttgaaaaagtatatatcttcacatgaaacctcgacaaaagctttctgaaaaactgctttgcgatgtgtgcattcatctcacagagttgaacttttctttttattgactagtttggaaacagttttttttcgtggaatctgcaaagggatatttgtgagtactttgaggcctagggtgaaaaaggaaatatcttcacatgaaaaccagacagaaactttctgagaaacttcttctttttatagaatctgcatatggatatttgtgagcagtttgaagactatggtgaaaaaggaaatatctacacataaaagctagacagaacctttcagagaaacttctttgtgatgtgtgcattcatctcacagagttttgtctttcttttgagtaagcagtttggaaacagtccttttgtagaaactgcaaagggatatttttgtgtgctctgaggcatatggtgaaaaaggaaatatcttcacataaaaactagacagaagctttctgagaaactttcttttgatgtgtgctttcatcttacagtgttgaaacttacatttgattgactagtttggaaacagtctttttgtagaatctgcaaagggatgtttgtgatccctttgaggcatatgatgaaaaaggaaatatcttcacataaaaacaagacagaagattcctgagaaactgcttagggacatgggcattcatttcatagaggtaaacgtttcttttcattgagcagataggaaactctgatcttgtcaaatctgcagagggatatttgtgagtgctttgaggcctatggtgaaaaaggaaatatctacagataaaaactggacagaagtttctgagaaacttctttgtgatgtgtgcattcaactcaaagggttcaacctttcttttgattgagctgtttgaaaacacactttttgtggaatctgcaaacagatatttgtgagcggtttggggcctatggtgaaaaaggaaatatcttcacataaaaactagacgaaagctttctcagaaacttctttgtgatgtgtgcattcatctcacagagatcaacatttcttcttgttgagcagtttggaaaaagtctttctgtggaatctgcaaagggatatttgtgagtgctttgaggcctgtggtgaaaaaggaaatatcttcagataaaaactggacagaagctttctgagaaacttctttgtgatttgtgcattcaactcaaagagttcaacctttcttttgattgagctgtttggaaacacgctttttgtggaatctgcaaacagatatttgtgagcggtttggggcctatggtgaaaaaggaaatatcttcacataaaaactagacgaaagctttctcagaaacttctttgtgatgtgtgcattcaactcaaagagttcaacctttcttttaattgagctgtttggaaacacgctttttgtggaatctgcaaacagatatttgtgagcggtttggggcctatggtgaaaaaggaaatagcttcacataaaaactagatgaaacctttctcagaaacttctttgtgatgtgtgcattcatctcacagagatgaacatttcttcttgttgagcagtttggaaaaagtctttctgtggaatctgcaaagggatgtttgtgatccctttgaggcatatgatgaaaaaggaaacatcttcacataaaaactagacagaaacattctgagaaatttctttgtgatgtgttcattgatcttacataaagttgaatctttatgtggattgagtagtttggaaacattctttttgtagaatctgcaaagggatgtttgtgactcctttgaggactatggtgaaaaagcaaatgtcttcccttcaaaactagacagaaggtttctgagaaactgctttttgatatgtgcacccatctcacagagataaaagtttcttttcattgagcagattggaaactctgttcttgtagaatccgcaaagggatatttgtgagcgctttaaggctatggtgaaaaagggaatgccttcacataaaaactagacagaatatttctgggaaacttcttgtgatgtgtgcattcatctctcagtgttgaactgtcttttgattgagcagtttggaaactgtctttttgtaaaatatgcaaagggatacttgtgagccctttgaggcctatggtgaaaaaggaagtatcttcacataaaaagtagacagggggtttatgagaaactgctttgtgatgtgtgcattcatttcacagtgttgaatctttcttttgattgagcagtttgggaacagtctttttgcagtatctccaaatggatatttgtgagccctttgatgcctatggttaaaaaggaaatatctttaataaaaactagacagaagctttgtgagaaacttctttgtgatgtgtgcattcatctcacagagttgaaaatttcttttcattgagcagtttcaaaacagtctttttgtagaatattcaaagggatattttagagtggtttgaagcccatgttgaaaaaggaaatatcatcacacaaaaaccagacagaaaatttctgagaaacttctttgtgatgtatactttcatctaacagagttgaacttttcttttgtttgagcagttgggaaactctctttttgtagaatctgcaaagggatatttctgagtgcttttaagcctatcgtgaaaaagaaaatatcttcatataaaaaatacagagatgttttctgagaaacttctttgtgatgtgtgcattcatctgacagagttgaaattttcctttgactgagcagtttggaaaccatctttttgtggaaagttccatgggatatttggagcgctttgaggcctatggtgaaaaaggaaatatcttcacataaaaactggacagaagatttctgagaaacttctttgtgatatgtgcattcatctcacagtgttgaaactttcctttgatttagcagtgtggaaacagtctttttgtaaaatctgcaaagggatatttgtgagctgttagaggcctatggtggaaaaggaaatatcttcatataaatactagacagaagctttctgagaaactaatttgtgatgtgtgctttcatctcacagagttgaatctttcttttgattaagctggctggaaacagtctttttgtagaatttgcaaagggatatttggggtgctttgagacctatgttgaaaaaggaaatatcttaatataaaaagtagacagaagctttctgagaaacatcattgtgatgtgtgccttcaactcacagagttgaacctttcttttgattgatcagtttggaaactgtcttttgtagaatctacaaagggatatttggagctctttgagacctatggttaaaaaggacatatcttcccataaaaactagatagaagctttctgagaaacttccttatgatgtgtgcgttcatctcacagagttcaacgtttcttttgattgagcagtatggaaacattctttttgtagaatctgcaaaggaataggtgtgagtggtttcaagcctatggtgaaaaaggagataccttcacataaaaactagacagaagcttcctgagaaacttctttgtgatatgtgcattcatctcactgagttgaaactttcttttgattgagcagtttggtaatagtttcttgtagaatctgcaaagggatatttgtgagttcttggtcacctatggtagaaagggatatatctttacataaaaagtagagagaagttttctgagaaactgacttgttacatgtgcattcatcccacagaagtaaacgtttcttttcattgatctgattggaaattctgttcttctggaatctgcaaagggatatttattagccctttgaggcctatagtgaaaaaggaaataccttcatataaaaactagacagaagcattctgggagacttctttctgatgtgtgcattcatctcacagagttgaacctgtcctttgattgagcagtttggaaacagtctttttataggatctgcaaatggatatttggagcactttgaggcttattgtgaaaaaggaaatatcttcacataaaacctagacagaaactttctgagaaactactttatgatgtgtgctttcatctcacacagttgaacctttcttttcatttagcagtttggaagcagtctttttctagtatctacaaggggatatttgtgagcataaggcctatggagaaaaaggaagtatctgcacttaaaaactagacagaagcttcttagaaacttctttgtgatgtgtggattcatctcacagatttgaaagttccctttgattgaacagtttagaaaaggtctttttgtagtatctgcaaaggtatatttgtgagcagtttcaggcctatggtgaaaaaggaaataccttcacataaaaactagacagaagttttctgagaaacttctttgtgatatgtgcattcatctcactgagttgaaaatttcttttcattgagcactttggtaacagttttttgtagaatctgccaactgatatttgtgagcccttggtcacctatggtgaaaaaggatatatgtttacataaaaagtagagagaagttttctgagaaactgatttgtgatgtgtgcattcatctcacagattttaacctttcttttgattgagcagtttggaaactcttttggtaggatctgcaaagggatatttgtgagcagtttgatgcctatggtgaaaaaggaaatatcttcacataaaaactagacagaaactttctaggaaacttctttgtgatttgtacattcatctcacagagttaaaactttctatttattgagcactttgaaaacagtctgtgtgtagaatctacaatgggatatttgtgagtgctttgagacgtattttgaaaaaggaaatatcttcatatagaaactagacggaagctttctgagaaacatatttgttatgtgtgctttcatcccactgagatgaaccattcttttgattgagcattttggaaacagtctttttgtagaatatgcaaagggatatttgtgagcctttggtgacctatggtgaaataggatatatcttcacataaaaactggacagaaggcttctgagaatatgatttgtgatgtgtgcattcatctcacagaggtaagcatttctcttcattgatcagattggaaactctcttcttgcagaaactgcaaagggatatttgtgagcactttgagtcctatggtgaaaaaggaaacatgtttgcattaaaacaagataaaagcattgggagaaacttctttgtgacatgtacattcatctcatggatatgaacctttattttgattcagcagtttggaagaagactttttgtagaatgttcaaagggatatttgtgagcagtttgaggcctacggtggaaaaggaaatatcttcatataaaaactagacagaagctttctgagaaactcctttgtgatgtgtgcactcaactcacaggtgtaaacgtttcttttcattgagcagattggaatctctgttcttgtggaaactgccaggggatatttggagtgcattgaggcctatggtgaacaatgaaatatcttaacataaaaagtagacagaagctctttgagaaacttctatgtgatgtgtggattcatctcacagagtggaaactttcttatgattgagcagtttggaaacagtcttttcgtagaatctgccaagggatattttgatcgctttttggtctattttgaaaaaggaaatatcttcacataaaaattagacagtacctttttgagaaacttctttgtgatgtgtgcattcatctcacacagttgaacacttcttgtgattgagcagtttggaaacagtctttttgtggaatctgcaaagggatatttggacagctttgaggacaatggtggaaaaggaaatatcttaacatacaaactagacagaagctttctgagaaatttccttgtgatgtgtgccttcatctcacagagttgaaaacttcttctgattgagcagtttggaaacagtctttttgaagaaacttccaaaggatatttggagggctttgaggcatatggtgaaaaaggaaatatcttatcataaacactagacagaagttttctgagaaacttctctgtgatgtttgcattcatcttacagagttgaaactttcttctgatagagcagttttcaaacagtctttttgtagaaactgcaaagggatatttgtgagatgtttgagacctatttggaaaaggtaatatcttaacataaaacctagacagaagatttctgagaaacttctttgtgacatgtgctttcatctcacagaattgaacctgtcttttgattgagcagtttggaaacagtctttgtgtagaatcagcaaatggatatttggagcactttcaggcatatggcgaaaaagggtatatgtccacatgaaaactagacagaagtttactgagaacttattcataatgtgtgcgttcatctcacagagttgaacatttcttttcattgagtagtttgaaaacaggtttttgtagtatctaaaaaagatatttggagttccttgaggcctatggtgaaaaaggaaatatcttaatataaaaactagacagaagctttctgagaaacttctttgtgatgtctgcattcatctcacagagatgaaacttactgttcattgagcagttaggaaacagtcctttcgtataatctaccaaggtatatttgtgtgcagtttgagacctatggggaaaaaggaaatatcttcacataaaaagtagacagaagctttctgagaaactactttgtgatgtgtgctttcatctcacagagttgaatctttcttttgactgagcattttgaaacagcctttttgtagaatctgcaattggatatttagagcgattagagacctaaggtgaaaaaggaaatatcttaacataatcactagaaagaaactttctgagaaacttctttgtgatgtctgctttcatctcaaacagttgaacctttcttttcattcagcagtttggaaacagtctttttgtagagtctacaaaggtatatttgtgagctgtttgaggcctatggtgaaaaaggaaatatatttatataaaatctacacagaagattttgagaaatttctttgtgatctttgtattcatctcacagagctgaacctttcttttgattgagcagtttggaaacagtctttttgtagaagttgcaaatggatatttggagtgctttgaggcctataatgaataatggatatcttcatataaaaactggacagaagatttctgaaaaacttccttgtgatgtgtgcattcatctcacagagttgaaactttcttttcattgagcagtttggaaagagtctttttgaagaatctaccacgggatatttggagggctttgaggaatatggtgaaaaagggaacatcttaaaataagaactagacagaagttttctgataaacatctttttgatgtgtgcattcatctcacagagttgaaactttcttctgattgagcagttttgaaacagtccttttgtagaatctgcaaagggatatttttgagtggtttgaggcctatggtgaaaaaggaaatatcttaaaataaaacctagacagaagctttctgagaaacttctttgtgatgtgtgcattcatcaaacagagttgaaacttcttttcattgagcagtttggaaaaagtctttttgaagaatctaccaagggatacatggagctcttttagtcctatggtgaaaaaggaaatatcttaacataaaaactagatagaatttttctgagaaacttctttgtggtgtgtgcattcatcaaacagagttgaaagtttcttctcattgagcagtttggaaaaagtctttttgaagaatctaccaaagtatacatggagctcttttagtcctatggtgaaaaagaaaatatcttaacataaaaactagatagaatttttctgagaaatttctttgtgatgtgtgcattcatctcacagagttgaaactttcttctgattgagcagtttcaatacagtctttttgtagtatctgccaagggatatttgtgagtggtttgaggcctatttcaagaaaggaaataccttcacttaaaactagacggaaactttttgggaaactcctctgtgatgtgtgcattcatctcacaggttgaatctttctttgattgagtagtttggaaacagtctgtagaatctgcaaatggatatttggagtgctttgaggcctaaggtgaaaaaggaaatagcgtcacaaaaaaactagacagaagctctctgagcagcttctttgtgatgtgttcattcacctcactgtgttgaacctctcttttgattgagcagcttggaaacagtctttttgtaaaatctgcaaaggaatatttgtgggcagtttgaagcctatggcaaaaaagaaaatatcttaacataaaaagtagaaagaagcattctgagaaacttctttgtgatgtgtgcattcatctgacagagatgaatctttcttttgattgagcactttggaaacagtctttttgtagaatctgccaagggatatggggagtgcttagaggcatatggtgaaaaaggaattttcttcacataaaaactagacagaagcattctgagaaacctctttgtgatggatgcactcatctcacatagttgaacatttcttctcaatgagcagttttgaagtggtctttttgtattatctaaaaagggataattggagcactttgaggcctatgatgaaaaaggaaatatcttcacataaaaactagacacaagcttcttcagaaactactttttgatgtgtgcattcatctcacagagttgtacctttcttttgattgagcattttggtaactgtctttttgtagaatctgcaaagggatatttgtgagcgatttaaggcctatggtgaaaaaggaaatatcttcacataaaaactagacagaggctttctgagaaacttctttgtgatgtgtgcattcatctcacagagtggaacctttcttttgattgagtagtttggaaaaagtatttttgtagaatctgcaaatggaaatttggagcactgtgaggcaaaggtgaaaaaggaaatatcttcacataaaaactagacagaatctttatgagaaacttccttgtgatgtgggcattcatctcacagatttgaaccattcttttgattgagcagtttggacacagtcttttttagaatccgcaaaggaatatttctgagcagtttgaggcttatggtgacaaaggaaatatcttcacataaacactagacagaacctttttgatatacttctttgagatgcatcaattcatctcacagagttgaacatttcttttaattgagcagtttggaaacagtctttttgtggaaactgcaaagggatatttggagtactttgtggcctatggtggaaaagaaatatcttcacataaacgctagacagaagatttctgagaaacttctttgtgatgtttgcattcatctgacactgttacaccattcttttggatgatcagtttggaaacagtctttttgtataatctgcaaatggatacttgtagcactttgaggtctgtggtgtaaaaggaagtatcttcacgtaaaaactagaaggaagctttctgagaaacttatttgtgatgtgtgcattcatcgcacagtgttgaaagtttcttttgattgaacagtttggaaacaggctttttgtagaatatgccaagggatattaggagtgctttgaggcctatgttgaaagaggaattatcttcacataaaatctagacagaatcttctttgtgatgtgtgcattcataatacacagttgaacctctcttttcactgagcagtttggaaacagtctttttgtagaatctgcaaacgaatattcggagggctttgtatcctatggtgaaaaaggaaacatcttcacataaacactatacagaagctttttgagaaacatctttgtgatgtgtgcattcatctcacagcgttgaaactttcttttcattgaacagtttgcaaacagtctttttgtagaatctgcatagggatatttggagccatttgaggcctacagtgaataaggaaatatcttcacataaaaactacacagacacattctgagaaactttgtgatgtgtgtattcatgtcacattgttgaaaatttatttcaattaagtagtttggaaagagtctttttgtagaatcagcaaagggatatttgagacccatttgaggcctatagtgaaaaagaaaatatcttcacataaaaactagacagaagttttctgagaaatttctttgtgacgtgtgcattcatctctcagagttgaacctttcttttgattgagcagtttggaaaaagtcttttgcagaacctgcaaagggataattggagcgctttcaggcctatggggaaaaaggaaatatttccacataaaaactagacagaagctttcttagaaacttctttgtcatgtgtgcattcatctcacagagattaacatttcttttgatggagcagtttggtatcaggctttttgtagaatctgcaaatggatacttggagtgttttgaggcttatggtgaaaaaggaaatatcttcacataaagactagacagaagatttctgagaaacatctttccaatgtgtgcattcacatcagagatttgaaactttcttttgattgagcagttttgaaacaatatttttgtaggatatgcaaaggggtaattgtgaggggtttgaggcctatggtggaaaaggaaatatctacacataaaaactaggcagaagctttttgagatacgtctttgtgatgtgtgcactcatctcacagaattgaacctttcttttcattgagcagtttggaaacagtctttttgtggactctgcaaaggactatttggaccgcgttgtgcatatggtgaaaaaggaaatatcttcacataaacactacatagaagctttctgagaaacttttttgtgatgtgtgcattcatctcacagagttgaaactttcttttgattgagcagtttagaaactgtctatttatagaatcttcatagggatatttttgagccctttgaggcctatagtggaaaatgaattatcttcacataaaaatcagagagaaactttttgagaaacttgtatgtgatgtgtgcatttatctcacagagtcaaagagttcttttgattgagcagtgtggaaacagtctttttgtagaatctgcaaagggatatttgtgagcactttgaggcttatggtgaaaaagaaatatcttcacataagaactagaaagaaggcatccgagagactgctttctgatgtgtaaattcttctaacagaagcaaacatttcttttaactgaacagattggaaactcctttcttgtagaatatgcaaacggatatttttgagcacagggaggactatgatgaaaaaggaaatatcttcacataaaaattagaaagaagctctctgtgaaacttctttgtgatgtgtgcattctcacagagttgaatctttattttgattgagcagtttagaaacagtctctttatagaatctgcaaaggaatatttgtgagccctttgaggcctatggtgaaaaaggaaatatcatcacataaaaactacacagaaactttctgagaaactgcttcatgctgtgtgcattcatctcacatagttgaatctttcttttgattgagaagctttgacagactctttttgtggaatctgcaatgggatatttttgatggcttgagacatattttgagaaagaaatatcttcacattaaaactagaaagatggcttctgagaaacagctgtctggtgtctgcattcatctcacagaggtaaacgattattttcattgatcaaattgcaaactctgttcttgtagattcttcaaagggatatttgtaagcgctttgaggcctgtggtgctatggtgaaaaaggaaatatcttcacataaaaaccagacagaagatttctgagaaacttcattgtgatgtgtacattcatctctcagagttgaactttcttttcattgagcagtttggaaacagttttcatgtagaatctgcaaacggatatttctgtgcgctttgatgcctatgttgaaaaaggaaatatctttacgtaaaaagtagacagaagctctctgagaaacttatttgtgatgtgtgccttcatcaggcagagttgaaccattcttttgatagagcagtttggaaacagtctttttgtagaatctgtaaagggatatttgtgttcactttgaggccgatggtgaaaaataaaaatcttcacataaaaactagaaagatggtatctgagaaactactttctgatgtgtgaattcttctaacagaagtaaaagtttcttttcactgagcagattagaaactcttttcttgtagaatatgcaaacggatatttttgagcacagtaaggactatgttgaaaaaggaaatatcttcacataaaactagacagatgttttttgagaaacttcttttttatgggtgtattattctcacagagttgaacccttattttgattgagaagtttggaaacagtttttttgtagaatctgcaaaaggatatttgtgagtgcttggaggactatggtgaaaaaggaaatctcttcacataaaaactaaacagaagctttctgaaaaacgtctttgtgatttttgcattcatctcacagagttcaaactttgttttgattgagcagtttggaaatagtcttcttatagaatctgcatagggatattttcaagccctttgaggcctatggtggaaatatcttcacataaaaattagataaaaggtttctgagaaactgcttcatgatgtgtgcattcatctcacagaggtaaatgttacctttcattgagcagattggaaactctgctcttgtaaaatatgcataggaatattcgcaagtgctttgaggcctacggtaaaaaacgaaatatcttcacagaaaaactagaccgaagctttctgagaaacttccttgtgatgtgtgcattcatctcacagagataaaactttcttttcatagagcagtttggatgcagtccttttttagaatcttcatagggacattagtgagcggcttctggactgtggtgaaaaaggaaatatgttcacataaaaatagacagaattcttctgagaaactttttttgatgcatgcattcatctcacagagttgaaattttcttttgatttagcaggttggaaagagtctttttgtagtgtctgcaaagtgaaatttgtgagcattttgaggcctattgtaagaaaggcaatatcttcacataaatctagacagaaacattctaagaaactcctttgtgatgagtagattcatctgacacatgtgaaccttacttttgattgagttgttttgaaagagtctttttgtagaatatgcaaagggacaatttttagtgctttgaggcctgctttgtgatctgtgcattcatctcacagagttgaaatattattttttgagaggtttggaaacagactttttgtagaatctgcagatggatatttgtgagcagtttgagccctattgtcaaaaataaatatcttcacataaaaagtatgaagacagtttctgggacactgctttgtgatggttgcattcatctctcagaggtaaacgattcttatcattgagcagattggaaactctgttcttgtaaaatctgcaaagggatatttgtgagtgctttgaggcctatggtgaaaaaggaagtatcttcacataaaaactagaaagaagctttctgagaaacttcttcatgatgtgtgaattcatctcacagagttgaacctttcttttgattgagcagcttggaaacagtatttctgtagaatctgcaaagagatatttgtgagtgctttgaggtgtatggtgaaaaagaaataccttcacatgcttatgacctgaatggtattgcctaggttttcctctaggatttttattttttagatctaacatgcaagtctttaatcaatcttgaattaatttttttatagggtgtaaggaagggatccagtttcagctttctacatatggctagcaggttttcccagcaccatttattaaataaggaatccattcccccttactagtttttgtcaggtttgtcaaagatcagagagttgtagatatgtggcattatttctgagggctctgttctgttccattgatctatacctctgttttggtacaagtaccatgctgttttggttactgtagtcttttaatatgatttgaagtcaggtagcgtgatgcccccagctttgttcttttggtttaggattgacttggtgatgtgggctcttttctggttccatatgaactttaaagtagtttttccaattctgtggagaaagtcattggtagcttgatggggatggcattgaatctataaattaccttgggcaatattgtcattttaacgatattgattcttcctactcatgatcatggaatgttcttccgtttgtttgaattctcttttatttcattgagcagtggtttgtagttctcatttaagaggtccttcacatcccttctaagttgcattcctaggtattttattctctttgaaacaattgtgaatgggagttcactaaaactccaaaagcaatggcaactaaagacaaaattgagaaatgggatctaattaaactaaaaagcttctgcacagcaaaagaaactaccatcagagtgaacaggcaacctacaaaatgggagaaaatttttgcaacctactcatctgacaaaggggtaacatcaagaatctacaatgaactcaaacaaatttacaagaaaaaaacaaacaaccccatcaaaaagtgggtgaagaatatgaacagacacttctcacaagaagatatttatacagcaaaaaaaaaaaaaaaaacataaaaaatgctcatcattactggccatcagataaatgcaaatcaaaaccacaatgagataccatctcacaccagttagaatggtgatcattaaaaagttaggaaacaacaggtgctggagagggtgtggagacacaggaacacttttacactcttggtgggacggtaaaataattcaaccattgtggaagtcagtgtggtgattcctcagggatctagaactagaaataccatttgacccaaccatcccattactgagtatataaccaaaggatgataaatcatggtgctataaagacacatgcacacgtatgtttattgtggcactattcacaatagcaaagacttggaacctacccaaatgtccaacaacgatagactggattaagaaaatgtggcacatatacaccatggaatactatgcagccataaaaaatgatgagttcatgtcctttgtagggacatggatgaaactggaaaccatcattctcaggaaactatcacaaggagaaaaaaccaaacactgcatcttctcactcataggtgggaattgaacaatgagaacacatggacacaggaaggggaacatcacgctctggggactgttgtggggtggggatagggtggagggatagcatttggagatatacgtaatgttaaatgatgagttaatgggtgcagcacaccaacatgacacatgtatacatatgtaacaaacctgcaaattgtgcacctgcaccctaaaacttaaagtataataataataaaataaaataaaaaaagatatcttcacataaaaaatagaaagaaggtttctgagtaacttctttctgatggctgcattcatctcacagaggtaaacctttcttttcattgagcagactacaaactctgttcttgtaggatcttcaaagtgatttttatgagcactttgagtcctatggtgaaaaatgaaatatcttcacataaaaactagacagaaactttctgagaaacttctttgtgatgtgtacattcatctcacagagttgaacctctcttttgattgagcagtttttaaaccatctttttctggaaactgcaaaggcatatttgtgagtgttttgaggcttacgatgaaaaaggaaatatcttcacataaaaactagacagaagcattttgtgaaacttctttgtgatgtgtgcattcatctcacagagttgaccctttcttttgattgagctgtttggaaacaattttttgtagaatcttcaaagggatgcttgtgagttctttgaggcctatggtgtaaaatgaaatatcttcacataaaaaccagacagaaatctgagaatgggcagactgcctcctcaagtagctccctgatcctcttgtagcctaactgggaggcacccccagcaggggtgtactgacacctcacatggccaggtactcttctgaaacaaaacttccagaggaccgatcaggcaacagcatttgtggtttaccaatatccgctgttcttcagccactgctgctgatacccaggcaaacagggtctagactggacctccaacacaccctaacagacctgaagctgagagccctcactgttagaaggaaaactaacaaacagaaaggacattcacaccaaaaacccatccgtatgtcaccatcctcaaagaccaaaggtagataaaaccacaaagatgggcataaaacagagcagaaaaactggaaactctaaaaatcagagtgcctctcctcatccaaagaacaccgctactcaccagcaatggaacaaagctggacagagaatgactttgacgagttgagagaagaaggcaacagacgatcaaactactctgagctaaagggggaagttcaagcgaatggtgaagagtttaaaaaccttgaaaaaaaattagacgaatggctaactagaataaccaatgcagagaagtccttaaaggaagtgatggagctcaaaaccaaggaagaagaactaattgatgaatgcagaagcctcagtagctgatgcgatcaactggaagaaagggtatcagtgatggaagatgaaatgaatgaaatgaagtgagaggagaagtttagaggaaaaaagaataaaaagaaatgaacaaagcctccaagaaatataggactatgggaaaagatcaaagctacgtctgattggtgtacctgaaagtgactgggagaatggagccaagttggaaaacactctacaggatactatccaggagaacttccccaatctagcatggcaggacaacattcaaattcaggaaatacagagaacaccacaaagatactccaagacacataattgtcagattcaccatagttgaaatgaaggaaaaaaatgttactggcagccagagagaaaggtcgggttacccacaaagcgaagcccatcagactaacagctaatttctcaggagaaactctacaagccagaagagagtgggggccaatattcaacattattaaagaaaagaattttcaacgcagaatttcatatccagccaaactaagcttcataagtgaaggagaaataaaatactttacagacaagcaaatgcggagagattttgtcaccaccaggcctgcccttaaaagagctcctgaaggaagcactaaacatggaaaggaacaaccagtaccagccactgcaaaaacacgccaaattgtaaagaccatcaaggctgggaagaaactgcataaactaatgagctaaataaccagctaacatcataatgacaggatcaaattcacacataacaatagtaaccttaaatgtaaattggctaaatgctccaattcaaagacacagactggcaaattggataaggagtcaagacccatcagtgtgctctattcaggaaacccatctcacgtgcacaaacacatatagactcaaaataaagggatggaggaagatctaccaagaaaatggaaaacaaaaaaaggcagggattacaatcctagtctctgataaaacagattttaagccaacaaagatcaaaacagacaaagaaggacattacataatggtaaagggatcaattcaacaagaagagctaactatcctaaaaatatatgcacccaatacaggagctcccagattcataaagcaaggccttaatgacctacaaagagacttagactcccacacaataataatgggagactttaacaccccactgtcaatattagacagatcaacgagacaaaaagttaacaagtatatccaagaattgaactcagctctggaccaagcagacctaatagatatctacagaactctccaccccaaatcaaaagaatatacattatttcaggaccacaccagatctattccaaaattggccccatagttggaagtaaagcactccttagcaaatgtaaaagaacaaaaattataataaactgtctctcagaccgccttgcaatcaaactagaactcaggatcatcctagccatcagagaaatgcaaatcaaaaccacaatgagataccatctcacaccagttagaatggcgatccttaaaaagtcaggaaacaacaggtgctggagaggatgtgaagaaataggaacacttttacactgttggtgggactgtaaactagttcaaccattgtggaagtcaatgtggcgattcctcagggatctagaactagaaataccatttgacacagccatcccattactgggtatatatccaaaggactataaatcatgctgctataaagacacatgcacacgtatgtttattgcggcactattcacaatagcaaagacttggaaccaacccaaatgtccaacaacgatagactggattaagaaaatgtggcacatatacaccatggaatactatgcagccataaaaaatgatgagctcatgtcctttgtagggacatggatgaaattggaaatcatcactttcagtaaactattgcaagaacaaaaaaccaaacaccacataaactcactcataggtgggaattgaacaattagatcacatggacacaggaaagggaacatcacactctggggactgttgtggggtgcggggaggggggagggattgctttaggagatatatctaatgctaaatgatgagttaatgggtgcagcacaccagcatggcacatgtatacatatgtaactaacctgccgttgtgcacatgtaccctaaaacttaaagtataatagtaataaaataaaataaaaaaatagaaaaaaaccactcaactacagggaaagtgaacaacctgctcctgaatgactactgggtatgtaacgaaatgaaggcagaaataaagatgtcccttgaaaccagcaagaacaaagacacaacgtaccagaatccctgggacacattcaaagcagtgtgtagagggaaatttgtagcactaaatgcccacaagagaaagcagaaaatatccaaaattgacaccttaacatcacaaataaaataactagaaaagcaagagcaaacacactcaaaagctggcagaaggcaagaaataactaagatcagagcagaactgaaggaaatagagaaacaaaaaacccttcaaaaaatcaaagaatccaggaggtggatttttgaaaagatcaacaaaattgatagaccgctagcaagactaataaacaagaaaagagagaagaatcaaataaatgcaataaaaaatgataaaggggatatcaccactgatcccacagaaatacaaactaccatcagagaatactataaacacctctacacaaataaactaggaaatcgagaagaaatggataaatttctcaacacatacatccaagactaaaccaggaagacgttgaatctctgaatagatcaataacaggctctgaaattcaggcaataatccatagcttaccaaccaaaaacactccaggaccagatggattcacagtcgaattctaccagaggtaaaaggaggagctggtaccattccttctgaaattattccaatcaatagaaacagaggaaatcctctctaactcattttatgatgccagtaccatcctcataccaaagcctggcagagacacaacaaaaaaagagaattttagacctatatccttgatgaacattgatgcaaaaatcctcaataaaatactggcaaaccgaatccagcagcacatcaagaagtttatccaccatgaccgagggggcttcatccctgggatgcaaggctggttcaacatacacaaatcaataaacataatctagcatataaacagaaccaaggacaaaaaccacatgattatctctatagatgcagaaaaggcctttgacaaaattcaacaaccttcatgctaagaactctcaataaattagatattgatgagacggatctcaaaataataagagctatctatgaaaaacccacagccaatatcatactgaatggaaaaaaactggaagcattccctttgaaaacttgcacaagacagggatgccctctctcaccactcctgttcaacatagtgttggatgttctagccagggcaatcaggcaggagaaaaaaataaagggtattcaattaggaaaagagagagtcaaattgtccctgcttgcagatgacatgattgtatatctagaaaactccatcgtctcagcccaaaatctccttaagctgataagcaacttcagcaaagtctcaggatacaaaatcaatgtacaaaaatcacaattcttatgcaccaataacagacaaacagagagccaaatcatgagtggactcctattcacaattgcttcaaagagaataaaatacctaggaatgcaacttacaagggccatgaaggacctcttcaaggagaactacaaaccactgctcaatgaaataaaagaggatacaaacaaatggaagaacattccatgcacatggggagaaataatcaatatcgtgaaaatggccatactgcccaaggtaatttgtacatttaatgccatctccatcaaacttccaatgactttcttcacagaattggaaaaaactactttaaagttcatatggaaccaaaaaagagcccgcatcaccaagtcaatcataggccaaaagaacaaagctggaggcatcatgctacctgacttcaaactacactaaagggttatggtaaagaaaacagcatagtactggtactaaaacgaagatatagaccaatggaacagaacagagccctcagaaacaatgccacatatctacaactctctgatctttgacaaacctgacaaaaacaagcaatggggaaaggatttcctttttaataaatggtgctgggaaaactggctagccatatatagaaagctgaaactggatcccttccttaaaccttatagaaaaattaattagacatggattaaagacttaaatgttagacctaaaaccataaaaaccctagaagaaaacgtatgcaatgccattcaggacataggcatgggcaaggagttcatgtctaaaacacaaaaagcaatggcaacaaaagccaaaattgacaaatgggatctaattaaactaaagagcttctgcacagcaaattaaactaccatcagagtgaacaggcaaccaacagaatgggagaaaatttttgcaaactacttatctgacaaagggctaatacccacaatctacaatgaactcaaacaaatttacaagaaaaaaaaaacaaccccatcaaaaagtgggtgaaggataagaacacacacttctcaacagaagacatttatgcatcaaaaaaacacatgaaaaaatgctcatcatcaccggccatcagaaaaaatgcgaatcaaaaccacaatgagataccatctcacaccaattagaatggcaatcattataaagtcaggaaacagcatgtactggagaaaatttggagaaatcggaacactcttacactattggtgggactgtaaaatagttcaaccactatggaagtcagtgtggtgattcctcaaggacctagaacaagaaataccatttgacccagccatcccattgctgggtatatacccaaaggattataaatcatgctgctataaagacacaatcacacatatgtttattgtggcaatattcactatagcaaagacttggaaccaacccaaatgtccaacaatgatagacgggattaagaaaatgtggcacatatacaccatggaatactatgcggccataaaaaatgatgagttcatgtcctttgtagggacatggatgcagctggaaaccatcattctcagcaaactatccaaggacaaaaatccaaacaccacatgttctcactcagaggtgggaattgaataatgagaaaacatagacacagaaagggaaacatcacaaaagggggaatgctgtggggtggggggagtggagagggattgcattaggagatatacctaatgataactgacgagttaatgggtgcagcacaccagcatggcacatgtatacatacgtaacaaacctgcacattgtgcacatgcaccctaaaacttacagtataataataatagaataaaaaaaataaaacttctctctagtttttatgtgaatatacttgtttttcaccataggcctcaaactgctcacaaatattcctttgcagattctacaaaaagactttttccaaactgatcagtcaaatcaaatgttcaacactgtgagatcaatgcacacatcatgaagatgtttctcagaaagcgtctgtctagtttttatgtgaagatatttcctttttcaccacaggcctcaaagtgctcaaaagtatccctttgcagattccacaaagagactgtttccaaactgctcaatgaaaagaatcatttacatctctgaaatgaatgcacacaacacaaagcagtttctctgaaaaacctgtctagtttttatgtgaagatattccctttttcaccataggccacaaagggctcacaaatatccctttgcagattctacaataaaactgtttccaaaatgctcaatcaaaagaaaggttcaactctgtgagatgaatgcacacatcagaaagaagtttctcagaaacttctgtctagtttttatgtgaacatacttcgtttctcaccataagtctcaaagcactcacaaatatccctttgaatattctacaagaacagaggttccaatctgctcgattaaataaatctttccttctgtgagatgaatgtacacatcacaaatcagttcctcagaaaccttctttctagttttaatgtgaagacatttctttttcaccataggcctcaaagctctgacaaatatccctttgcacattctgcaaaaagactgtttcaaagctgctcaatcaaaagaatggatcaacactgtgagatgaatgcacacatcacaaagaagttcctcagaaagatttttctagtttttatgtgaggatattttcctttttgccataggcctcaaaccgctcaaaatatccctttgcagattctaccaaaagactgcttccggactgctcaatcaaaagaaagttcaactctgtgagatgaatgcgcacatcacaaagaaatttctcagagatcttttgtccagtttatgtgatggtatttcctttttcaccataggtctcaaagcactcacaaatatccctctgcagatgctacaaaaagactgtttccaaactgctcaatcaaaagaaaggttcaactttgttagatgaatgctcacatcacaaagaagtttctcagaaagtttctgtctattttttatgtgaagatatgtcctttttcaccataggactcaatgtgctcacaaatatccctttgcagatactacaagaacagattttccaacatgctcaatgaaaagaaacttttacctctgtgagatgaatgcacacatcacaaagcagtttctcagaaaccttctgtctagtttttatgtgaagatacttcccttttcaccataagcctccaatcgctcacacatatccctctgcagattctacaaacaaactctttccaagttgctcaatgaaaagaaagtctcaactctgtgagatgaatgcacacatcacaaagaagtttctcagaaagagtttctcttgtttttatatgaagatacttcctttttcacaataggtctcaaaaagctcccaaatatacctttgcagattctagaaggagacagtttccaaagtgctccatgaaaagaaacggtttcttctgtgatatgaatgcacacatcaaaaagcagtttctcagaaagcttctctgtactttttatgtgaagatatttcctttttcaccatagagctcaatgtgctcccaaatattgctttttagattctacaaaaagtctgtttccaaactcctctatcaaaagaatggttcatctctgtgagatgaatgcacacatcacaaagaactttctcaggaagcttccatctggttttcgtgtgaaggtgtttcctttttcaccatagggctcaatgcgttcctaaatattcctttgtagatcctacaaaaagacactttcaaaactgcccaatcaaaaggatggttcacctctgtgagatgaatgcacacattccacagaagtttctcagaaagcttctctatagtttttatgtgatgatatatactttctcaccataggcctcaaggcactcacaggtatccctatccagatactagaagaacagagtttccaaactgctcaatgaaaagaaacgtttacttctgtgagatgtatgccgaattcacaaagcagtttctcagaaagcttcttcctagttttaatgtcaagatttttttttcaccataggcctcaaagcactctcaaatatccctttgcagattctacaaaaaggcttttgccaaattgcttaatcaaaaggatggtgcaactttgggagatgaatgcaagcttcacaaagaagtttcacagaaaacttcggtctagttctaatgtgagaatatttcctttttcactataggccttaaagcactcaaaatatccctttgcagatcttccaagaactgattttccaaactgctcaatgataagaaacttttacctctgtgaaatgaatgcacacatcacaaagaagtttctcagaaagcttctttctagtttttatgtgaagatatttccttttacaccataggcctcagcgtgctcccaaatatccctttgcagattctacaaaaactgttaccaaactgctcaaacaaaagaatgtcacagctctgtgaggtgaatgcacacatcaaaaagatgtttcacagaaagcttctgtctagtttttatgtgaagatatttcctttctcaccataggactcagtgcgctccccaatatctgtttgcagactctacaaaaagactgcttccgaagtgctcaaagaatggttccactcggtgggatgaatacacacatcacaaggaagtttctcagaaagcttttgcctactctttctgtgaaggtatttcctttttcaacatttacctcaaatcactcacaaatatcccattgcagattggagaagaacagagtttccaaacttctcaatgaaaagaaacgtttgcttctgtgagatgaatacacacatcacaaagcagtttcttagaaagcttctgcctagtttttatgtgaagatatttcctttttcaccatagacttcaatgcactcccaaatatccctttgcagattctacaaagagaatatttgccaactgctcaatcaaaacaatggtccaaatcagtgaaatgaatgctctcatcacaaagaagtctgtcagtaagcttctatctagttcttatgtgaaggtattttctttttctccctagccctcaatgcactcccatatatccctttgcagattctacaaaaagaatgtttccaaactgctaaatcaaagaatggttccactctgtgaggtgaatgcacacatcacaaagaagtttctcagaaaatttctgtcaattttttatgtgaagatatttcctttttcaccataggtcccaaagctctcacaaatatcccttggcagattctacaaaaagacggtttccaaactgctcaatgaaaacaaacatttagatctgtgagatgaatgcacacatcagaaagcagtttctcagaaagcttctttctatttttactgagaagatatttcctttttcaccatagacctcaatgcagtatgaaatatccacttgtagatactacaaaagactgtttccaaactgctcaatcaaaagaatggttcagctatgtgagaagaacgcacacatcaaaaagaagtttctcagaaagttttttcctagttttcatgagaagatatatcctttttcatggtatgccacaaagcgctcacaaatatccctttgcagattctagaagaacagttttcatactgctcaatgaacagaaacatttacctctgtgagttgaatgcacacataacaaagcagtttctctgaaagattctttcaactttttttatgaagaaatttcctttttcatcataggcctcaaagcactcccaaatatccctttgcagattctgcaaaaagactgtttccaaactgctcaatcaaaagaatagttcaactctgtcagatgaatgcacacatcacaaataagtttctcagaaaacttctgtctagttttcctgtgaagatatttcctttttcaccatagacctcaaagtgctcacaaatatccctttgcagattctagaagaatagagtttccaaaatgctcattgaaaagaagttttacctctttcaggtaaatgcacacatcacaaagcagtttctctgaaagcttctttctagcttttatgtgaagatatttcatttttcaccatagacctcaaggtgctcctatatatacttatgaagattctacaaaaagactgtttccaaactgctcaatcaaaagaatgattcaactctgtgagatgaatgcacacatcacaaagaagtttctcagaaaacttctctttagttcttatatgaagatatgtcctttttcaccataggtctcaaagcactcacaaatatccccttgcagattccagaagaatagagtttccaaagtgctccattaaaagaaacgtttacctctgtgatatgaatgcatgcatcaaaaagcagattctcagaaggattctttctactttttatgtgaagatatttcctttttcaccataggcctcaaagcactctcaaatgtccctttgcagattctacaaaaagacttttccaaactgctcaatgaaagaatgattcaactcagtgagatgaatgcagacatcacaaagaagtttctcagaaaacctctgtatagcttttatgtgacaatatttcctttttcatcataagcctcaaagtgctcacaaatatccctgtgcagaatctagaagagcagagttgccaaactgctcaataaaaagaaacgtttacctctgtgaaatgaatgcacacatcacaaaccagtttttcagaaagtttctttctagtttttatgtgaagatatttcctttttcaccatagacctcagtgcgctcccaaatatccctttgcagattctacaacaggacagtttccaaactgctcaaacaatagcatgtcacagctctgtgaggtgaatgcacacatcacaaagatgtttcacagaaagcttctgtctagtttttaggtgaagatatttactttttcaacataggcctcaatgcactccccaatatccctttgaagattctacaaaaagactgcttacaaagtgctcaatcaaaagaattgttcaactctttgagatgaatgcacacatcacaaggaagtttctcagaaagctgctgtctatttatatgtgaaggtatttcctttttcaacatttgcctgaaagcactcccaaatatccctttgcagcttctacaaaaagagtgtttctaaattgtgcaatcaaaaggattgttcaactctgtgagatgaatgcacacatcacaaagaactttctccaaaatcttctgtctagtttttatttgaagatatttcctttttcaccataagcctcaaagtgctcacaaatatccctttgcagattctagaacagtgtgtccaaactgctcaattaaaagaatctttaccactagagatgaatgcacacatcacaaagaagtttctcagaaagcttctttgtagtttttatgtgaaggaatttcgtttttcaccataggcctcagcgtgcccccaaatatccctttttagaatctgcaaaaagactgtttccaaaccgctctatgaaaagaatggttcaactctgtgagacgaatgcacacatcacaaagacgtttcttagaaagtttctgtgtggtttttatggaaagatacttcctttttcaacataggctgcaaagtgctcacaaatatccatttgcagcttctagaagaacagggtttccaaactgttcagtgaaaagaaacctttacctctgcaagtttaatgcacatatcaaaaagaagtttctcagaattcttctttctagtttttatgtgaagatatttcctttttcaccatagggctcaatgcactcccaattatccctttgcagtatctatgaacagactgtttacaaactgctcaatgaaaggaaagtttcaactctgagatgaatgcccacatcacaaagaagtttcccagaaagcttctgtctagtttttgtgtgaagatacttcctttttcaccataggcctcaacgcactcccaaatatcccttttcttgattgtacaaaaagactgtttccaaactgctctatgaaaggaatggttcaactctatgcgatgaatgcacacatcacaaaggagtttctcagaaagcttctttctgctttttatatgaagatatttcctttttcacaataggccgcaaagaactcacaaatatccatttgcagcttctagaagaacagagtttccaaactactcagtgaaaagaaacctttacctctgtgagttgaatgcacacatcacaaacaagtttctcagaatgcttctttctagtttttatgtgaagatatttccttttcacaagagctcaacgtgctcccaagtatccctttgcagtttctatgaacagactgtttccaaactgctcaatgaaaagaaagtttcaactctatgagatgaacacccacatcacaaagtagtttcccagaaagcttctgactagtttttatgtgaggatatttcctttttcaccataggccacaaagggctcaaaaatatgcccttgcaattcaacaaaaagactgtttccaagcagctcaccaaaagaaatgttcaaccctgagatgaatgcacacatcacaaagaagtttctcagaaagcttctttctagtttttatgtgaagatatttcctttttcaccatacacttctaagcactccaaatatccatttgcagattctagaagaacaggttttccaaactgctcaatgaaaacaaacttttacctctgggagatgaatgcacacatcacaaagcagtttctcagaaagtttcttcctagtttttatgtgaagatatttcgtttttcaccataggactccaaatgttcccaaatatccctttgctgattgtacaaaaagactgtattgaaagtgctcaatcaaaagaatagtccaactctgttagaggaatgcacacatcacaaagaagtttctcagaaagattctgtctagtttttatgtgaagatatttcctttttcaatgtaggcctcaaagaactctcaaatattcctttgtagatgctagaaaaacagagtttccaaattgctcaatgaaaacaaatgtttacctctgtgagatgaatgcccagatcacaaagctgtttctcagaaaggttctttctagtttttaagtggagatatttcctttttcagcatagatctcaaagctctgaaaaatatcacttaacagattctacaaaaagactgcttccaaatggctcaatcaaacgaatgcttcaactctgtgagataaatgcacaagtcaaaacgaagtttctctgaaatcttctgtctagtttttatgtgaagatatttcctttttcaccataagcctcaaaacactcacaaatatccctttgcagattccagaagaacagtttccaaactactcaatgaaaaaaaaaaaaatttacctctgtgggatgaatgcacacatcacaaagcactttctcagaaagcttctttctactttttatgtgaagatatttccattttcagtataggcatcaaagcactctaaaatatccgtttgcagattccacaaaaagactgtttccaaactgttcaattaaaagaatgtttcaactgtgtgagatgaatgcactcgtcacaaagaagtttctcagaatggttctgtgtggtgtttttgtgaagatatttcctttgtcaccgtaggcctcaaggcactcacaaatatcccttttcagattctggaagaacagagtttccaaactgctcaatgaaaagaatcatttacctctgtgagatgaatgcacatatcacaaagaagtttctcagaaagcttcttttaagtttttatgtgaagatatttcctttttcaccttaggtctcaaagctctccctgatatcctttggcagaatgtacaaaaatactgtttccaaactgctaaatcaaaagaatggttcaactctatgacacgaatgaacatatgatgaagaagtttctcagaaatcctgtgtctagtttttatgtgaagatatttccttttcaccgcaggcctcaaagcactcaaaaatatccctttgcaaattctagaataacagagtttccaaacttctcaatgaaaagaaagttttacctctgtgagatgagtgcaaacatcctaaaccagtttctcagaaagcttctttctacttttcatatgaagatatttcacttttcaccataggcctcagcacactcccaaatatccctttgcagattctataaaagactgtttccaaactgctcaattgaaagtatggatcaactctgggaaaggaatacaaacatcataaagaagtttctcagaaagcttctgtctggttttcatatgaagatatttctattttcaccatagtcctcaacatgttcccaaatatccccttgcagatgccaaaaacagactgtttccgaattgctctatcaaaagaatggttcagctctgtgtgatgaatgcacacattacaaagaagtttctcagaaagattctgtctagtttttatgtgaagatatttattttttcaccataggtatcaaagcactcacgaaaatccctttgcagattctagaacgacagagtttccaaagtgctgaatgaaaagaaatgtttacctctgtgagataaatgcacacatcatagagaagtttctcagaaagcttgtttctagtttttatgtgaagatatttcctttttcaccataggcctcaaagagctcccaaatatccctttacagattctacaaaaagactgtttccaaactgctcaatcaaaagaatggttgacctccacgagatgaatgcacacatcattaagtagtttctcagaaagcttatttcttgtttttatgtgaagatatttattttttcaccataggtatcaaagtgctcatgaatatctctttgcagattctacaacaacagggtttccggagtgctcaatgaaaaggaatgtttacctctgtgagataaatgcacacatcataaagaagtttctcagaaagcttgtttctagtttttatgtgaagttatttccttttcaccacaggcctcaaagtgcacccaagtatccctttgcaggttctccaaaaacactatttgaaactgcacaatcaaatgaatggttcatctctgtgggatgaatgcacacatcacaaagcagtttctcagaaagctgttttctagtttttacatgaaggtatttcctttttcaccacaggcatctaagcgctccaaaatatcccttttcagattctgcaaaaagactgtttccaaactgttcaatcaaacgaatggttcaagtctgtgagatgaaggcacacatcacaaaggagtttctcagaaagcttctttctagtttttatatgaagatatttcctttttcaccataggcctcaaagtgctcccaaatacacctttgcagattctccaaaaacagtttccaaactgctcaaccaaacgaatggttgatttttgtgaggtgaatgcacacatcacaaagcagtttctcaggaagcttctgtctagtttttatgtgaagatatttcctttttcaccataggcctcaaagtactcacaaatattctttgtagattgtagaagaacaatgtttccaaacgtctcaatgaaaagaaatgtttacctctgtgagatgaatgttcacatcacaaagcagtttcttagaaagcttcttcttgtttgcatgtgaagataattcctttttcaccatagatctcaaagcgctcacaaatatcccttttcagattctagaagaacagagtttccaaactgctcagtcaaaagaattgttcaactctgtgagatgaatgcacacatcacaaagtagtttctcataaacttctgtctaattttgatttgaagatatttcctttttcaccatgagcctcaaagcattcccaaatatccctttgcagtttctacaaaaagactgtgtgcgaactggtcaaacaatagaatggttcaacttggtgagatgaatgcacacatcacaaataagtttctcagaaagcttctgtctagtttttatgtgaaaatatttgctttttcaccatagaaaaacaaaataacttcagataaaaacaagaaataagctttctgagaaactgcattttgatgggtgcatttgtctcacagagtttaacagttcttttgattgagaagttttgaaaagctgtttttttcccattctaggaatggacattcagtagctcctttagtccgttggtgaaaaagtggatttcccagtattaaaactagaaggaagctatctgagaaaccgctttgtgatttttgtattcctttcacatagtgaaatctttctttttattcagctgttaagaaacactgttttttagaatctgcaaagggatatcggaagcacatacaggcctatggtgaaaaagaaaataacttcagataagaactagaaagaaactttctgagaaactgctttgtgatgtgtgcattcatctcacaatgttaaacctttctttgattcagcattttggaaacagtttttctctattcagcaaatggacatttgggagttcattgaggccaatggcaaaaaagcaaatatcgcaggatacaaactagaaagaagctgtctgacaaaccgctttgtgatatgtgcattcttctcacagagataaaccattcttttcattaagccatctggaaacagtttttgtagaatccgtgaagggatatttgggagctctttgaacctattggggaaagagcaaatatccaaggataaaaactagaaggaaattatctgaaaaacctctttgtaatgtgtccgttcatctttcaaagttaaacccttcttttcattcaggagtttggaaacactgtttttgtagagtctgcaaagggatattttggagtgcattgagacctgcagtgaagaagaaaatatcttcagataaacacaagaaagaaactttctgagaaactgctttgtgatgcatgcattcatctcacagacttaaacctttcttttgaatcagcagtttggaaacactgtttttgaagaatctgcaaaaggatatttgggagcacattgagtcctgtggagagaaagaaattatctttacataaaaactagaaataagcttttggagtaactgctctgtggtgtgtgcactaatctcagagataaacctctcttttcattcaactctttggaagcagtgtttttttagaatctgtgaatggacatctgggagtatattgaggctgatggtgaaaaataaaaaatcttcagataaaaactagaaagaacctttctgagaaactgctttgtgatatgtgcattcatctcacagaattaaacttttctttgattctgcagtcttgaaagcctgtttttgtccattcagtgaatcaacatttgggaatacactgtggccaatggtgaaaaagcaaatatcccaggataaaaattagaaggaatttttctgagaaaccaatttctgatgtgtgcattcatcttgcagagttaaaacttccttctcattcagcagtttggaaacactgtttttgtagaatctgcaaagggatatttgggagtgcattaaggcctgtggtgaaaaagacaatatattcgataaaaactgaaaagaagctttataagaaactgcactcctctcacagagttaaagctttcctttgattcagaggtttggaatcactctttttgttgaatctgtgaagtgatatttgggagcgctttgagacctatggtgaaaaacaaaatatctttagataaaaactagaaagaagctttctgagaactcctctgtgatatgtgcattcatctcacagagttaaacattccctttgattcagcagtttggagacactgtttttgtccattctgagaatggacaatttttaagctcattgaggccaatggcaaaaaagtaaatatcactggataaaaactagaaggaaattatctgagaaactactctattatgtgtgcgttcatctcgcagagataaacagttcttttcatcaagcagtttggaaatattgtttttgtagaatcttccaagggatatttgggatatcattaaggccaaagacaaagaaaatatcccgggtaaaaactagaaggaagctgtctgagaaactgctttgtgatgtgtgcattcatctcacagaggtaaacctttcttttaattcagcagtttggaaacactgtttttgtccattctgtgaatgaaccatttggagctcattgagacaaaggaggaaaaaggtaatatcccatgataaaaatgagaaggaatctatttaagaaactgctttgtgatgtgtgcattcatctggccgagttaaaccataagtttcattcagcagtttgaaaacacggttttcgtaaaatctgcaaaatgatatttgagagcactttgaggcctatggtgagaaaaaaacaatgttcaggtaaaaaatagaaaaatgctttctaagaaacagctttgtgatgtgtgcattcatctcacagagttaaacctttattttgattcagcagttttgagacactgtttttttccattctgtgaatggacatttgggagctaattgaggcaagaggggaaaaagctaatatcccatgataaaaactagatagaagctatctgagagactgctttgtgatgtgtgcattcatcttgcagagtgaaatctttcttttcattcagcagtttggaaagacaatttttgtaaatctgtgaagggatatttgggagctcattggtgccaattgcaaaaagctagtatcccaggataaaaatgtgaacgaaggtatctgagaaacggctttgtgatgtgtgcattcttcttgcagactgaaatctttcttttcattcagcagtttggaaacactgtttttgtaaaatctgcaaagggatctttgggagcactatgagtactatggtgaaaaagaaaatatcctcagataaagagtagaaagtagctttctgagaaactgctttgtgatgtgtgcattcatctcatggagttaaaactttattcttattcaggaatttggaaatcctgtttttgcccattctgcaaactcattgatgccaatggtgaaaaagcaaatatctccggataaaaaatggaaggaagctatctcagaaacagctctgtgatgtgtgcattcatctggcagagttaaacctttcttttcattcagtagtttgtaaacactctttttgtagaatctgccaaggtgtatttgggagcactgtgagacctatggtgaaaaataaattatcttcaatgaaaagtagaaagacggtatctgagaaactactatgtgatgcgtgcattcatctaacagagtgaaaactttcttttcattcagcagtttggaaacactgtttttgtagaatctgtgaagggatatttgggagcacattgaggcctatggtcaaagaggaaatatcttgagataaaaggtggaaggaagctttatgagaaactgctttgtgatgtgtgcattcctctcacagagttaaacctttcttttgattcagcagtgtggaaacactgtttttgcccattatgcaaatgtacatttgggagctcataaaggtcagtggcaaaaaagcgaatatcccaggataaaaaccagaaggaagctttctgagaaatcactttgtgatgtgtgcatttgtctcacataatgaaatctttcttttcattctgcagtttggaaaaactatttttgttgaatctgtgaagttgtatttcagagtgcatagggagctattgtgaaaaaatatatacattcagataaaaagttgaggaagcatttgagaaactgcattctgttgtgtgcattcatctcacagagttaaacttttcttttcattcagcagtttggaaatactattttttttccattctctgagtggatatttggaagctctttggggccagtggtgaaaaagctgatatccctggataaaaactagaaggaagctctgtgagaaactgctttgtgatgtgtgcattcatctcacagatttaaaactctcttttgatagaatagtttggaaacactgtttttgtagaatctgtgaagggatatttgaaatcacattgattcctatggtgaaaaaggaaatatcttcacataaaaactagaaaacagctttatgagaaactgctttgtgatgtgtgcattcatctcacagagttaaagctttcttttgtttgagcagtacgaaaaaaatgtttttttggggaacctacaaagggatatttgagagcaccttgagacataaggtgaaaaaggaaatttcttcagataaaaacaggaaagaagctgtctgagaaggtgcttaatgatgtgtgtgttcaactcacaacaataaacttttcttttgattcagcagtttgggaacactgtttatgtagaatcataacagagagggagagcagtgaggcatagggtgaaaaagaaaatatctccatataaaaactagaaagaagctttctgagaaactactttgtgtgtgtgcattcttctcagagagttaaacctttattatgattgagcagtttggaaacactgtttttgtagaatctacgaagggatatttgggaccgcattgaggcctttggtgaaaaaggaaatgtcttcagagaaaaactagaaagaagctttctgataaacggctttgtaatgtgtgcattcatcatacagaggtaaacctttcttttgattgagctgtttggaaacactgtttttgtagaatctgcaaaggcatatttggaagaactttgaggcctatggtgaaaaacggattatcttcagaggcaaacaactagaaagaaactttctgagaaactgctttctgatgtgtgcattcaactcacagagttaaacctttcttttgattgaatagttaggaaacactgtttttgtaggaactgtgaagagatattttggaacacattgaggcctgtggtgaaagaggaaatatcttaagatacaaactagaaagaagatttctgagacagtgctgtatgatgtgagaattcatctctcagaggcaagcctttcttttgattgagcagtttggaaacaatgtttttgtagaatctgtgaagggatattttgaagcgcattgagtcctatgatgaaaacccatatatcttcagataaaacctatagacatgctttctgatgaactgctttgtgatgtgtgcattcacctgacagacttaaaccattcttttgattgagtgcgttgtaatcactctttttgtagaatctgcaaaggggtatttgtgagcacattgaggcatatggaggaaaatgaattattttcagattagaaactacaaagaagttttctgagaaactgctttgtcatgtgtgcattcatctcacagagccaaaactttcttttgatggagcagtttgaaaacactgtttttgtacaaactgcaaaagtatatttgggagagcattgagacctatggtgaaaaaaatatgcttcagataaaacaggaaagaagctttctgagaaactgtttttgatgtgtgtattcatctcacacagctaaacctttctcttcattgagtagtttggaaacactgtttttgtaaaatctgtgagggggatcttggagcacactgaggcctatggtgaaaaaggaaatatcttcagataaaaaataaaaagaagcttcttagaaactgcttagtttgtgtgcattcatctcacacagttaaaactttcttttggttgagcagtttggaaactctgtttttgtagaatctgcaaagggatatatggcagcacattcaggcctctgctgtaaaaggaaataccttcagataaaaactagaaaaaagctttgtgagaaactgctttgtgatgaatgcattcatctcaaagaggtaaatctttcttttcattgagcagttttgcaacactgttttttgggaatctgagaagggatatttgggagcattttaaggcctatggtaaaaaataaaatatcttcagataaaaactagaaggaacctttctgagaaactgctttgtgatgtgtgcattaatctaagagttaaaactcttttttggattgagcagtttggaaaaactttttctatagaatctgtgaaggcatatttaggagcgcttggaggcatatggtgaaaaaggaaatatcttcagagaaaaacaaggaagaagctttctggcaactgctttgtgatgtgtacattcatctcacagagttacaatgttattttgattgagcagtttggaaatactgtttctgttaaattggccaaaggatatttgggagcgcattgaagctgagagttaaaaaggaaacatcttaaaataaaaagtagaaagaaactttctgagaaactgctttgtggtgtatgcattcatctcacagggttaaacctttcttttgattgagcagtttggagaaagtgttttggtagactgtgcgaagggatatttgggagcacttgaggcctatggtgaaaaaggaaatatcttcagatacaaactaaagaaaaagcctttttataaaccactttgggatgtgtgcattcttctcacagagttaaacatttttattaattgtgcagtctggaaacactgtttttgttgaatctatgagttgacatatgggagtgcattgaagccaaacgtgaaaaagtaaatatattggaagaaaaactagaaagaagctatctgagaaactgctttgtgatgtgtgcattcgtctcaaagagttaaacctttcttttgattgagaagttcagaaacagtttttgtacaatctgcaaagggatatttggggagagtttgaagcctatggtgaaaaaggaaatatcttcagataaaaactagaaagaagctttctgagaaactgtatgtgatgagtgcattcatctaacaggtttaaaactttctttagattgtgcagtttggaaaccctgtttttgtagaatctatgaagtggtatttgggagtacattgaggcctttggtgaaaaaggaaatatgttcagataaatactagaaagaagattttcagcaactgctttgtggtttgtgcattcttctcacagagttaaacgtttcttttgattgagcagtttggaaacactgttttggtagaatctaggaagggatatatcagagcacattgaggcctgggaagaaataggaaatatcctcagagaaaaattagaaagatttctgagaacctgctttgtgatgtgtgcattcatctcacagagttaaaatttcttttgattgagcatgttggcaacagtgtgtttgtagaatctcagaagggatattgagagcagttttagacctatgtttaaaaatgaaatatcttcagataaaaaataaaaagaagctttctgggaaactgctttttgatgtgtgcattcatctcacagagttaaacctttcttttgattgagcagtttggaaacactgttttggtagaatctatgaagggatatttcggagtgcacagatgcctatggtgagaaagaaaatatcttcaggtaaaaattagaaagatttctgagaaacttttgtctgatatatgtatttatctcacaaagttagacatttcttttgattgaccaggttggaaacaccattttcatccattctgtgaatgcaaatttggaagctcattgaggccgatcatggaaaagtgaatatcccaggataaaaattagaatgaagtaagttgagaaatggtattgtgatgtgtgcattcatgtctcacagttacacagttattttcattcagcagttttgaaacactttttttagaatctgcaaagggatatttgggagtgcattttggactgtgacaaaaagtaatgtatcttcagataaaatcttggaggaagctttctgataaactgctttgtgatgtgtgcattcatctctcagagttaaacctttcttttgattcagcagtttgaaaacacagtttttgtagaatatagaagggatattttggagcaaattgaggcctgtggtgaaaataatatttcttcagataaaaagtaggaggaagctatctaagaaacagctttgtgatgtgtgctttcatctcatagagttaaacttaccatttcattcaacagtttggaaacactgttttttttagaatctgcgaattgacatttgggagtgcattgaggccaatggtgaaaaataaaaaatcttcagataaaaactagaaaggagctttctgagaaattgctttgtgatatgtggattcatctcacagagttaaacttttctttgattcagcagttttgaaagcctgtttttgtccattcagtgaatcaatatttgggaatgcactgtggccaatggtgaaaaagcaaatatcccaggataaaaactagaaggaatttatctgagaaaccactttctgatgtttgcattcatcttgcagagttaaacctttcttttcattcagtagtttggaaacactgtttttgtagaatctgtgaagggatatttgggagtgcattaaggcctgtggtgaaaaagaaaatatattcagacaaaaaattgaaaagaagatttataagaaactgctttcatctcacagagttaaacctttccttagatttaaaggtgtggaatcacggtttttatgaatctgtgaagtgatatttgggaccgctttgaggcctatggtgaaaaagaaaatatcttcgtataaaaactagaaggaagcttttgagcactgctttgtgatgtgtgcattcatctcacagagttaaaccttccctttgatttagcagtttggagacagtgtttttgtccattctgagaaaggacatttggaagcttattgaggccaatggcaaaaaaagtgaatatttctgggtaaaaactagaaggaaattatctcagaaactgctctatgatgtatgcattcacctcacagagataaaccattcttttcattaagtagtttgggaacacatttttgtagaatcttccaagggatatttgagagatcatcagggccacaggcaaagaagtgaatatcccagggtaaaaactagaagaaagctatctgagaaaccacattgtaatgtgcacattcatctcacagacttaaaccattcttttgacttggcagtttggaaacactgtttttgtccattccgcaaatggacatttgggagctccttgagtccaaaggcgaaaaagggaatactccaggataaaactgacaaggaagctgtctgacaaaccgccttgtgatttgtgcattcatcttggagagttaaacatttcttttcatgcagtagtttggaaacactctttttctagaatctgcaaacagatatttgggagcgcattgagaactacggtgtaaaaggaaatatattcagtaaaaaactagaaagaagatttctgagaaattgctttttgctatgtgcattcatgtcacagagttaaagctttcttttgattgagcagtttggaatcattgtttttgttgaatctgcagtgatatatttgggaccacactgaagcctatggtgaaaaagaaaatatcttcacaggaaaaattggaaagaagctttctgagaaaccattttgtgttgcatgcattcttctcaaagagttcaaccattcttttgattgagcagtttggaaacactgcttttgtagaatatgcaaagggatatttgggggcgcattgaggccaatggtgaaaaatgaaatatcttcagataaaagctagaaagaagttttctggtaaactgctttgtgatgtgtgcattcatctcatataggtaaacctttcttttgattgagcagtttggaaacactgttttggtagaatctgtgaagggttattagggattgcattggggactgtggtgaaaaaggaaatatcttcagataaaaactagaaagaagctttctgagaaactgctttgagatgtgggcattcgtctcacaacgttaaaactttcttttgattgtgtagtttgtaaacattgtttttgtagaatctacgaagggatatttgggagcacataaaagcatatggtgaaaaaggaaatatcttcagataaaaactagacagaagctttctgagaaaccattttgtgatgtgacattcttctcatagagttaaaccattcttttggttgagtagtttggaaactgttttttttagaatctgtgaagggatatttgggagccaattgaggccaagggtgaaaaaggaaatatcttcacataaaaactagaaagaagttttctgagaaactgctttgtgatgtgtccattcatctcacagaattaaaacttccttttgaatgggcagtttggaaacacagtttttgatgtatctgtgaagggatatttgggagcgcatcaagatctatggttaaaaaggaaatatcttgggataaaaagtagaaagaagctttctcagaaactgcttcgtgatgtctgcattcttctcacagagttaaacctttcttttgattgagcagtttggaaacactgtttttgtagaatctgtgaagtgatatttgggagggcattcaggcctatggtgaaaaaggaaatatcttcagataaaaactagaaagaaacattctgagaaactgctttctgacgagggcattcatctcacacagttaaatctttcttttggatgagtagtttggaaacactgttttggtaggatctgagaagagatacttgggagcacattgaggcctatgctgaaaaaggaaatatcttcatataaaaactaaaaagaaactctctaggaaactgctttgtgatttgtgcattcatctcacagagttaaatctttcttttcattttgcagtttggcaacactgtttttattgaatctgtgaagggacaattgggagcacattgaggtctatggtcaaaaaggaaatatcttcagataaatactagaaagaagttttctcagaattggctttgtgatgtgggcattctcctgacagagttaaacttttcttttgatttagcagtttggcatcaacgtttttgtagaatctgagaaggggtgtttgggagcactttgaggcctacggttaaaaagggaacatcttcagataaaaactagaaagaagatttctgggaaactgctttatgatttctaccttcatctctcagagttaaacctttcttttgattgagcagtttggaaacactctttaggtaggatctgcaaagagatatttcagagcgagttgaggcctatggtgaaaaaggaaatatattcagaaaaaaactagaaggaagtttctcagaaaccgctttgtgttcagggcgttcttctcacagagttaacctttattttgattgagcagtctggaaacactgtttttgtagaatctacaaagggatatattgtagtgctttgtggtctacagtaaaaaaagaaatatcttcagataaaaactagaaagaaggtttctgagaaactgctctgtgaagtgtacattcttctcacacagttaaacatttccattgatcaagcagcctggaaagattgttttggtagaatctatgaagggatatatgggagtgtattgaggcctatggtgaaaaagaaaatatcttcagagaaaaactagaaagaagctttctgagaaactgctttgtgatgtgtgcattcatctcacagagtgaaacctctcttttgactgagcagtttggcaacagtgtgattgtagaatctgagaagggatgtttgggagtgcttcagggcctatggtgtaaaaggaagtatcttcagataaaaactagaaagaagctttctgggaaactgctttgtgatgtgttcattcatcccacagagataaacctttcttttgattgtgcagtttggcaacactgtttttgttgcatctgtaaaaggacacttggaagtgcattggggtctatggtgaaaaaggtaatatcttcagataaatatgaagcagtgtgggaaatctatttttatggaatctgtgaagggacatttgggagtgtattgagtcctatggtgaaaaaggaaatatcttcagataaaaactagaaagatgctttctcaaaaacagctttgtgatgggtgcattcttctcacagagttaaatctttcttttcattgagcagtttggaaacactgttttggtagactctgcgaagggatattttgtagagctttgaggcctatggtgaaaaaggagataacttcagattaaattagaaagaagctttctcagaaacagttttgtgatgtgtgcattcttctcacagagttaaatatttcctttcattaagcagtctggaaacactgttctttttttttaaatctaggaagggatatatgggagcacattgaggtcagtggtgaaaaaggaaatatcttctgagaaaaactaggcagaagcttcctgagaaactgctttgtgatgagtgcattcgtctcacagaattcatactttcttttgattgagcagtttggcaacactctttttgtagaatctgagaaggtatatttgggagtggtttgaggcctatggtgaaaaaggaaatatcttcagaggaaaactagaaagaagctttctcagtaaccaccttcagatgtgtgcattcatctcagagagttaaaccattctttgagcagtttggaaacactgttttcgtaggatgtatgaagggatatttgggagcgcttacaggcctatggtgaaaaataaatatcttcagataaaaactagaaagaagctttgtgagaaacactactttgtgatgagtaagttcatctcacagagttaaaattttcttttgatttttcagtctgacaacggtgtttttaaaaatctgagaagggatatttgggagtgctttgaggcctatggtgaagaacaatatatcttcagatataaaatagaaagaaacattctgggaatctgctttgtgatgggtgcattcttctcacagagttaaacctttcttttgattgagcagtttggaaacactgtttttttaaaatatagaaagggataaattggagcacactgaggccagtggtgaaaaaggaaatatcttcagatagaaactagaaagcagctttctgagaaaatggtttgtgatgtgtgcattcatctcatagagtttaaccatacttttcattgagaagtttgaaaacactgttttggtagaatctgcaaagggatattaaggatcgcttataggcctctggtgaaaaattaaatatcatcagataaaaactagaaagatgctttctgataaactggtttgtgacgagtgcactcatctcaaagagttaaatgtttcgtttgattgagcagtttggaaacagggactttggagaatctagaaggcatatttggaagcactttgaggcctaaggtcaaaaaagaaatatcttcagataaaaactagaaagaagctttctgggaatctgtttgtgatgtgtgcatttatgtcacagtgttaaaactgtcttttgattcagcaggatggaaagactgttttggaagaatctgcgagacacatttgggatcactttgagacatctgttgagaaaggaaatatcttcaggtaaaaactagaaagaagctttctgggaaactgctttgtgatgtgcatattcttcccacagagtaaaacctttctttgattgaacagtctggaaacactgtttttgtagagtctatgcagggatatacgggtgcacattgaggactatggtgaaaaaggaaatatcttccaagaaatactagacagaaaatttctgagaaactgctttgtgatgtgtgcattcatctcacagagttaaacctttcttttgattgaggagtttccaaaccccgttttggtactatctgtgaagggatatttgggagggcattcagacctatggtgaaaaagggaataccttcacataaatagtagaaagaagctttctcagaaaacgctttgtaatgtatgcattcttcttacagagtttaaccattcttttgagcaatttggagaccctgtgtttgtggagtctgtgaaggtatatataagagcgcattgaggcctatgatgaaaaagaaaatatcttcacagaaaaagtagaaagaagctttttgagaaacttctttgtgatgtgtgtattcttctcacagaggtaaaactttcttttcattgagcagtttggaatcactgttttggtagaatctccgaagggatatttgggagtgcattcaggcctatggtgaaaaaggaaatatcatcagagaaaaattagaaagaagctttctgagaaacccctttgtgatgtgtgcatttttctcccagagttaaacctttcttttcatttagcagtctggaagcactgtttttatagaatcttggaagggatatatgagagtgcattgaggcctatggtgaaaaaagaaatatctttagataaaaactagaaagaagctttctgagaaactgctttgtgatgagtgcattcatctcacagagttaaaacttccttttgattgaacagtttggcaacactctttttgtagaatctgagaagtgatattgggagcaattagaggcttatagtgaaaaagggaatatcttaggataaaaaatagaaaatgaattttgagaaactggtttatgatgtgtgtattcatttcacagagttaaacctttcttctcattgaggagtttggcaacactgtttttgaaagatctgtgtgggtatatttgggagcgctttgaggcctatggtgaaaaaggaaatatcttcagactaaaactagaaagaagctttctctgaaactgccttctgatgtgtgcattcatttcacagagttgaagcattcttttgattgagcagtttggaaacactgttttggtaggatctgcgaagggatatttgggagcacttacgggtctatggagaaaaataccttcagataaaaactagaaagaatctttgcgaaaaactgttgtgatatgtaagttcatctcacagagttaaacttgttattgtgcagtttggcaacagtgcttttgtaaaatctgagaaggatacttgggactgctttgatgtctatggtgaaaaacaaaatatcttcagatataaaatagaacttttctaggagaatgctttgtgatgtacacattcttctcacagggttaaacctttcttttctttgagcatatttgaaacactgttcttggagaaaatgccatgggatatatgggaacgcattgaggcctagggagaaaaaggaaatatcttcagataaaaactataaagaatctttctgagaaaccactttgtgatgtgtgcattcatctcacacttataccattcttttcattgagcagtttggaaacactgttttggtaggatctgcaaagggatatttgggagcgatttcaggcctctggtgaaaaataaaatatctctggttaaaaactagaaagaatcgttctgagaaactgatttgtgaggagtacattcaccacaaacagttaattgtttattttgattgagcagtttggcaacagtgcttttgtaggatctgtgaaggcatatttgggtgcgctttgaggccaatggtcaaaaaagaaatatcttcagataaaaattagaaagaaactttctgggaacgtttttgtgatatgtgcattcatctcacagagatcaaattttcttttgattaagcagtctggaaacactctttgtgtagcatctacccagggatatatcggaacacattgaggcctatggtgaaaaaggaaatatcttccgagaaaaactagacagaagctttctggtcaaattctttgtgatgtgtacattcatctcacagagttaaacctttttttgattgagcagtttgccaatactctttttgtaaaatctgagaagggatatttcggagggctttgagtgaaaaaggaaacgtcttgagataataagtagaaagaagctttctgggaaactgcttttgatgtattcattcttctcacagagttaaacctttcttttgattgagcaatttggaaaaactgttgttggagaaaatgcaaagggatatatgggcacgcattgaggcctatggtgaaaaatgaaatatcttcagatgaaaactataaagaagctatctgagaaaccacgttgggatgtgtgcattcatcttacagagttaaatcattcttttcattgagaagtttggaaacactgttttggtagaatctgtgaagggatatttgggagcactttcaggtgactggtgaaaaattaaataccttcagataaaaactagaaagaagctttctgagaatccaccttctgaatagtatgttcatctaaaaagttaaacatttattttgattgagctgtttggcaacagtgctttcatagaatctgcaaagacatatttgtgagtacttagaggccaatggtcaaagaataaatatcttcagataaaaactagaaagaagctttgtgggaactgttttgtgatatgtgctttaatctcacagagctaaacagtcttttgattgagcattgtggaaacgctcttttggtagaatttgcaaagacatacatgggatcacatcgaggagtatggtgagaaaggaaatatcttcagataaaaactagaaagaagttttctgggaaactgctttgtgatgtgtgcactcatcaaacagagttaaacctttcttttgcttgagcaatttggaaacactgttttggaagtatctgtgaagggatatttgagagcccattgagggctttggtgaaaaggacatatgttcagataaatacaagaaagaagctttctcagaaatggctttctgaagtgtgcattcttctcacaaaattaaaaatttcttttgattgagtagtctggaaacattgtttgcatagagtctactaagggatatataggagggcattgcggcttacggtataaaaggaaatatcttcagagaaaaactagacagaagctttctgagaaactgctttgggttgtgtccattcatctcacagagataaacctttcttttgattcagtagtttgcaaaaactcttttggtagtatctgccaagtgatattttggagcccattcaggccaatggtgaaaaaggaaatatcttcagataaaaacaagaaagacaccttctgagaaacagctgtgtgttgaggacattaatctcacacagttgaaagtttctttagatacactagtgtggaaacactgttttggcagaatctgtgaagagatatttcggagtgaattgaagcctactgtaaaaaagggaatatcttcagataaatactagaaagaagctttcgcagaaactgctttgtgatgtgtgcattcttctcacagagataaacctttattttggttgagcagtttacaaaccctgttttggttttatctgcaaagtgatatttgggaacgcatttaggccaatgctgaaaaaggaaatatcttcagagaaaaactgaaaagaagctttctgagaaactgctttgtgatgtgtgcattcaactcacagagttaaacgtttcttttgattgagcagtctggaaatgctgttttggtagaatctgcgaagggatatttgggagcacattcaggacaatggtgaaagaggaaacatcatcagagaaaaagtaaaaagaagctttctgagaaacttctttgtgaagtatgcattcttctcacagagttaaacctttcttttcattgagcagtctggaaccattgttttttttagaatctaggcagggatatatgagagcacattgaggcttgtagtgaaaaaggaagtgtcttcagataaaaactagagacaagctttctgagaaactgctttgtgctgagtgcattcatctcacagaattaaacctttctttgattgaacagtttggcaacactctttttgtagaatctgagaagggatatttgtgagcactttgaggcctatagtgaaaacgggaaggtcttcagataaaaagtagaaataagatttctgggcaaccgctttatgatgtgtgcattcatctcacagagtcaaacctttcttttgattgagcattttgccaatactctttatgtagaatctgagaagggttacttgtgagcactttgtggcctatagtgaaaaagggaacatcttcagataaaaagtagaaagaagctttctaagcaactgctttctaatgtctgcattcacctcacagagttaaactttcttttgattgaacagtttggaaacactctttttgtagactctgagaagggatatttgggagcattatgaggcctatagtgaaaaaggaaatatcttcagatgaaagctagaaataagccttctcataaaccacctttttatgtgtgctttcttctcacagagttaaagaattcttttgattgagtagtatggaaactctgttttgataggatctgcgaagggacatttgtgggcactttcaggcctatagggaaatgttaaatattttcagataaaaactagaaagaagctttgtgagaaactgctttgtgattattaagttcatctcacagaggtaaaaccttaattgtgcagtttggcaacagagctgttgtaaaatctgagaagggctatttgggaacgctttgaggcctatgttgaaaaacaaaatatcttcagatataaactagaaagaagctttctgagaatctattttgtgatgtatgcattcttctcacagagttaaacctttcttttgattgagcattttggaaacactgtttttggagaatctgccaagggatgtatgagagctcattgaggcttatagtgaaaaaggaaatatcttcagataaaaactagacagaagtgtctgttcatgtctttcgcccactttttgtggaagtcagtgtggtgattcctcagggatctagaattagaaataccatttgacccagccatcccattactgggtataaacccaaaggattataaatcatgctgctataaagacatatatacacgtatgattagagcggcactattcacaatagcaaagacttggaaccaacccaaatgtccaacaatgatagactggattaagaaaatgtggcacatatacaccatggaatactacgcagccataaaaaatgatgagttcatgtcctttgtagggacatggatgaaattggaaatcatcattctcagtaaactatcgcaggaacaaaaaaccaaacaccgcatattctcactcataggtgggaactgaacaacgagaacacatggacacaggaaggggaacatcacacactggagactgttgtggcgggggagggggaaggataacattgggagaaatacctaatgctagatgacgagatagtgggtgcagcacaacagcatggcacttgtatacatatgtaactaacctgcacattgtgcacatgtaccctaaaacttaaagtataataataataaataataaataaatgaaaataaagttatggccattacagaataagaaataaacattaaaaaaactagaaagaaaccatcaaagaaactgctttgtgatatgtacattcacctcacagtagtaaactattcttttcattaagcagtttggaaacactgttttggtagaatctgcaaagggatatttgggagcaactagagtcctatgttaaaaaaggaatgatcgtctgagaaaaagtagaaagaagctttgtgagaaactcctttataatgtgtacatacttctcacagagttaaagctttcattctattgagcagcctggaacttctttttccttagaatctaggaagggatatatggagcatattgaggccaacagtgaaaaaggaaatatcttcagagaaaaacgagaaagaagctttctgagaaactgttttgtgatgtgtgcattagtctcacagagttaaacatttattttgattgagcagtttggaaacactgttttgatagaatctgcaaagagatatttgggagcacattgagacctctggtgaaaaagaaaacatcatcagagaaaaagtagaaagaaaatttctcagaaattgctttgtgatgtgtgcattcttctcacagagttagacctttcttttcattgagtagcctggaaccactgtttttttcagaatctaagaagggatatatgacagcacattgaggcttataatggaaaaggaaatatattcagataaaaactacaatgaaattttctgagaaacttctttctgctgagtgcatttatcacacacaatgaaacctttcttttgaatgagcaatttgtcaacactctttttgtagaaaccgagaagggatatttgtgagtgctttgaggccaataatgaaaaagggaatgtcttcagataaaaactagaaagaaactttctgggaaactgctttctgatgtgtgcattctactcacagaggtaaacctttcttttgattgagcaatgtggaaacactgttgttggagaaactgcaagggatatacgggagctcattgagggctatggtgaaaaaggaaacatcttccaataaaaagtagaaagaagcattctaagaaattgcttcatgatgtgtgcattaatctcacagagttaaacgtttcttttgattgagaagtttggaaacactgttttggtaggatcagtgaagggatatttgggaccgccttgaggcctgtggtaaaaagcgaaacatcatcagagaaaaagtagaaagaagatttctgagaaactcctttgtgatgtgtgcatacatctcaaagagttataccttatatcttattgagcagtctataaactttgtttttttatggactattggttttttatttcattttactttattttattattatactttaagttttagggtacacgtgcacaaagtgcaggtttgttacatatgtatacatgtgccatcttggtgtgctgcatccattaactcgtcatttagcattaggtatatatcaaaatgctatccttccccctcctcccaccccacaacagtcaccagagtgtgatgttccctgtcctgtgtccatgtgttctcattgttcaattcccacctatgagtgagaacatgcggtgtttggttttttgtccttgtgagagtttgctgagaatgatggtttccagtttcatctgtgtccctacaaagacataaactcatcattttttatggctgcatagtattccatggtgtatatgtgccacattttcttaatccagtctatcgttgttggacatttgggttggttccaagtctttgctattgtgaatagtgccacaataaacatatgtgtgcctgtgtctttatagcagaatgatttataatcctttgggtatatacccggtaatgggatggctgggtcaaatggtatttctaattctagatccctgaggaatcgccacactgacttccacaatggttgaactagtttacagtcccaccaacagtgtaaaagtgttcctatttctctacatcctctccagcacctgttgtttcctgactttttaatgaccaccattctaactggtgtgagatggtatctcattgtggtttagatttgcatttctctgatgtacagtgatgatgagcattttttcgtgtgttttttggctgcataaatgtcttcttttgagaagtgtctggtcatatcctttgccagttttttgatggggttgtttgtttttttcttgtaaatttgtttgagttcattgtagattctggacattagcactttttcagatgagtaggttgtgaaaattatctcccattttgtaggttgcctgttcaccctgaaggtagtttcttttgataatgggagactttaacaccccactgtcaacattagacagatcagggagacagaaagttaacaaggatacccaggaattaaactcagctttgcaccaagcagacctaatagacatctatggaactctctacctcaaatcaacagaatatacatttttttcagcaccacaccacacctattacaaaattgaccacctagaaagaagtaaagcacacttcagcaaatgtaaaagaacagaaattataacaaactgtctctcagaccacagtgcaatcaaactagaactcaggattaagaaaatcactcaaaactgctcaactacatggaaactgaacaacttgctcctgaatgactactgggtacataacgaaatgaaggcagaaaaaaagatgctctttgaaaccaatgagaatgaagacacaacacatcagaatctctgggacacattcaaagcagtgtgtagagggaaatttatagcccacaagagaatgcaggaaagatccaaaattgacaccctaacctcacaattaaaagaactagaaaagcaagagcaaacacattcaaaagctagcagaaggcaagagataactaaaatcagagcagaactgaagaaaacagagacacaaaaaacccttcaaaaaaataatgaatccaggagctggttttttgaaaagttcaacaaaattgatagacaactagtaagactaataaagaagaaaagagagaagaatcaaatagatgcagtaaaaaatgataaaggggatatcaccaccgatcccacagaaatacaaattaccatcagagaatactataaacagctctatgcaaataaactagaaaatctagaagaaatgaataaattcctcaacacatacatccacccaagactaatccaggaagaagttgaatctctgaatagatcaataacaggctctgaaattaaggcaatagtcaatagcttaccaaccaaaaaaagtccaggaccagatggattcacagccgaattctaccagaggtacaaagaggagctggtaccattccttctgaaatgattccaatcaatagaaagagaagaaatcctcccaaactcattttatgaggccagcatcatcctgataccaaagcctggcagagacacaacaaaaaaagagaattttagaccaatatccttgatgaacattgatgcaaaaatcctcaataaaatactggcaaactgaacccagcaacacatcaaaaagattatccaccatgatcaagtgggcttcatccctgggatgcaaggctggttcaacatatgcaaatcaataaatgtaatccagtatataaacaaaaccaaagaaaaaaaccacatgattatctcaatagatgcagaaaaggcttttgacaaaattcagcaacgcttcatgctaaaactctcaataaattaggtattgatgggacgtatctcaaaataataagagctgtctatgacaatcccacagccaatatcatactgaatgggcaaaaactggaagtattccctttgaaaactggcacaagacagggatgctctctcaccactcctatttaacatagtgttggaagtgttggccagggcaattaggcaggagaaggaaataaagggtattcagttaggaaaagaggaagtcaaattttccctgtttgcagatgacatgattgtagatctaggaaaccccatcatctcagcccaaaatctcgttaagctgataagcaacttcagcaaagtctttgcatacaaaatcaatgtgtgaaaatcacaagcattcttattcaccaataacagacagagagccaaaccatgagtgaactcccattcactattgcttcaaagaaaataaaatacctaggaatccaacttacaagggaggtgaaggacctcttcaaggagaactacaaaccactgctcaatgaaataaaagaggataaaaagaaatggaagaatattccatgctcatgggtaggaagaatcaatatcgtgaaaatggccatactgcccaaggtaatttatagactcaatgccatccccatcaagctaccaatgactttcttcacacaattggaaaaaactactttaaagttcatatggaaccaaaaaagagccctcatcaccaagtcaatcctaagccaaaagaacaaagccagaggcatcacgctacctgacttcaaactatactacaaggctacagtaaccaaaacagcatagtactggtaccaaaacagcatagtactggtaccaaaacagagatatagatcaatggaacagaacagagccctcagaagtaatgccgcatatctacaaccatctgatctttgacaaacctgacaaaaacaagcaatggggaaaggattccagatttaataaatggtgctgggaaaactggctaaccatatgcagaaagctgaaactggatcccttccttacaccttatacacaaattaattcaagatgaattaaagacttacatgttagacctaaaaccataaaaatcctagaagaaaacctaggcaataccattcaggacatagtcatggacaaggacttcatgtctaaaacaccaaaatcaatggcaacaaaagccaaaattgacaaatgggatctagtgaaactttgttttcttggaatctaggaagagatatattggagctcattgaggccaacggtgaaaaaggaaatatcttcacataaaaactagaaggaagctttctgggaaactgctttgtgctgagtgcattaatctcacagagtgaaacctttctttttaatgagaagtttggcagcactctttttgtgcactctgagaagggatatttgggagtcctttgaggcctatagtgaaaatggaacgtcttcagataaaaaaacgaaaagctttctgggactgcattgtgaagagtaagttcatcacaaagagttaaacatttcttctgattgtgcagtttggcaaccgtgcttttgtaaaatctgagaagggttatttgggagcactttgaggcctatgttgaaaaacataatatcttcaggtataaagtagaaagacactttctgggaatctgtttcatgatgtgtgcattcttctcacacaggtaaacctttcttttgattgagcagtttggaaacactgttgttggagaatctgagaaggggtattttggagcactttgaggcctatagtgaaaaacggaacatcttcatatagaaactagaaagaatctttctgggaatctgttttgtgaagtctgcattcttctctgagaattaaaccttcctttggattgagcagtttggaagccctgttttggttgtatctgtgaagtgattcttgggagcacattcaggccgacggtgaaaaaggaaatatcttcagagaaaaatgagacaaaagtttgctgagaaacttctttgtgatgtgtgcattcatctcactgagttaaacgtttcttttgattgaggagtttgcaaacactgttttggtagaatctgctaagggatatttggaagtgcattgaggcctatggtgaaaaaggaaacatcatcagaggaaaagtagaaaaaagctttctgagaaactcctttgtgatgtgtgcattcttctcacagagttaaacctttcttttcattgagcattctggaaccactattttttttagaatctaggaagtgatatatgacagtgcattgaggcctataatgaaaaaggaaatatcttcagataaaaactagaaagaagcttcttgagaaaatgctttgtgctgagtgcactcatctcacagagctaaaagttttttctcattgagcagtttggcaacactctttttgtaggatctgagaagggatatttgtgagcactttgaggcctatagtgaacaagggaacatcttcagataaaaactagaaagaagatttctgggcaactgctttatgatgcatgcattcatctgacagaggtaaaccttttttttgattgagcagtttggaaacactgttgttggagaatctgccaagggatatatgggagctcattgagggtgacggtgaaaaaggaaatatcttctgatgaaaagaagagagaaggtttctaagaaactgcttcatgatgtgtgcattcacgtcatagagttaaacgtttcttttgattgagcagtctggaaatactgttttggtaggatctgcaaagggatgtttgggagtgtgttgaggcctatggtaaaaaaggaaacatctcagagaaaaagtagaaagaagctgtctgagaaactcctttgtgatgtgtgcatacttctcacagagttaaatcttgcatttcattgagcaatctagaacctctgtttccttagaatctaggaagggagctccatatccatatgggagcacattgaggacaaaggttaaaaaggaaatatcttcagataaaagctagaaaaaagctttccgagaaactgctttgtgctgagtgcattcatcccacagagttaaacctttcttttgatagagcagtttggcaacactttttctgtagactctgagaagggataattgggagcactttgaagcctattgtaaaaaagggaacgtcttcagataaacactagaaagaacctttctgggaaactgctttgtgatatgtgcattcttctcagagaggaaaacctttcttttgattgagcagtttgcaaaccctattttggttgtatctgcgaagtgatatttgggagctcattcagtcctaaggtgaaaaaggaaatatcttcagagaaaagttagaaagaagctttctgagaaactgctttgtgatgtgtgcattcgtctcacagagttaaaagtttcttttgattgagcagtttggaaacactgttttggtagaatctgcgaaggggtatttgggagcaccttgaggtctatggtaaaaaaggaaacatcatcagagaaaaagtagaaagaagctttttgagaaacttcttggtgatgcaggcattattctcacagagttaaaccatgcttttcattgatccgtctggaaacactgttcttttagaatctaggaaaggatatttgagagtgcattgaggcctatagtgaaaaaggaaatatcttcagttaaaaactagaaagaagctttctggaaaactgctttttgctgagtgcattcacctcacaaaatgaaacctttcttttgaatgagcagtttggcgacactctttttgtagactccaagaagggatatttgtgagcactttgaagcctctagtgaaaaagggaacatcttcagataagtaatggaaagaagttttctgggaaactgctttgtgaagagtaagttcatctcacagagttaaacctttattttgattgtggagtttgacaacagtgcttttgtaatatctgagaaggcatatttgggatcactttgaggcctatattgaaaaacttagtatcttcaggtataaagaataaagaagctttctgggaatctgcttcatgatgtgtgcattcttctcacacagttaaaccttttgtttgattgagcagtttggaaacactgttggataatctgccaaggtctatggtgaaaaaggaaatatcttcaaatcaaaactaaaaagaagatttctgagaaacttctttgtgatgtgtgcattcttgtcccagagttaaacttttcttttcattcagcagtctggaaacactgtctttttagaatctaagaacggatatatgagagtgcactgaggcctgtagtgaaaaaggaaatacctttagataaaagctagaaagacactttctgagaaactgcatggcactgagtgcattcatctcacacagttaaaactttcttgtgattgagtagtttgtcaacacagtttttttagatgctgtgaagggatatttggaagtgctttgaggcctatggtgaaaaaggaaatatcttcagatgaaaactagaaagaagccttttcagaaaccacctctggatgtgtgcattcatctcacagagttaaagcattcttttgattgagcagtttggaaacactgttttggtaggatctgcaaagggatattttggagcacttacagacctatagtgaaaagtcaaatatcttcagataaaaactagaaagaaggtttgtgagaaactgctttgtgatgagtaagttcatctcacagaggtaaacttttcctttgattgtgaagtttggcaactgtactttggtaaaatctgagatgggaaactgggagcactttgaggccagtgttgaaaaacaaaatatctttatatataaactagaaagctttctgggaatctgctttgtgatatattcgttcttctcacagagttaaaccttcctgttgattgattgagcagtttggaaacgctattgttggaggatctgccaaggaatatatgggagctcattgaggcctatggtgaaaaaggaaatatcttcagttaaaaaataggaagaagctttctaagaaaccgctttgtgacgtgtgcattcacctcatagagttaaaccattcttttcattgagcagtttggaagtacttttttggtagaatctgtgaagggatatttgggagtgctttgaggcctatactaaaaaaagaaacattatcagagaaaagttagaaagaagctttctgagaaacttctttgtgatgtatgcattcttctcacagagttaaaactttcttttccttgagaagtctggaaccactgtttttttagaatcaaggaagggatatatgagagctctttgtggcctatagtgaaaaaggaaatattttcagataaaaactagaaagaagttttctgagaagctgctttgtggtgaatgcattcatctcacagaattaagcctttcttttgattgagcagtttggcaacactctttttgtagaatctgagaagggatattagggagtgctatgaggcttatagtgaaaaaaacaacatcttcagataaaaactagaaagaacttttctggacaactgctttatgatgtgtgtattcaaatcatagtgttaaaactttcttttgattgagcagtttgccaatactctttatgtagaatctgagaaagaatattttggggtgatttcaggcctatagtgaaaaagagaacatcttcagataaaaattagaaagaagctttctgagcaactactttctgatatgaccattcatctcagagaggtaaacctttctttgattgagcagtttggtaacacagtttttgtagattctgtgaagggatatttgggagcactttgaggcctgtggtgaaaaggaaatatcttcatatgaaaactagaaagaagctttctctgaaactgccttctgatgtgtccattcatctcatagagttaaaacattcttttaattgagcagttgggacacactgttctggtaggatctgcgaaggaatatttgggagcacatacaggcttataatgaaaagttatatgtctgcaaataaatactagaaagaagctttgtgagataatgctttgtaatgagtaagttcttctcacacagttaaatctttcttttgatagtgcagtatggcaacatggcttttgtaaaatctcagaaaggatattttggagtgctttgaggcttgtgttgaaaaacaaaattatcttcaggtacaaactaggaagaagctttctggtaatctgctttgtgatgtgtgcattcttctcaaagagttaaacttatcctttagttgagcactttggaaatactgttgttggaaaatttgccaagggatatatgggagctcattgaggcctatgttgaaaatggaagtatcttcagacaaaaaccagaaggaagctttctaagaaactgttttgtgatgtatgcattcagcttacagagttaaaccattcttttcattgagcagtttgaaaacactgttttcgtagaatctgcaatgggatatttgagagttccttgaggcttatgttaaaaaaaggaaagattatcaaaaaaaaaaaagtagaaagaagctttctgagaaactccttcatgatgtgtgcatacttctcacagagttaaacctttcatttcattgaacagtctggaacctctgtttctttagcatctaggatgggatatatacaagtacttcgaggtcaatggtgaaaaaggaaatatcttcaaataaaaactagaaagaagctttctgacaaactactttgtgctgattacattcatctctcagtgttaaacctttcttttgattgtgcagtttggcaacagctctgttgtaaaatcagagaagggatatttgggagtgctttgaggccaatgttgaaaaacaaaatatcttcagatataaactagaaagaagctttctgggaatatgctttgtgattgtgcattcttctcacagagttaaaccgttcttttaattgagcagtttggaaatgctgttgttggagaatctgcctagggatgtatgggagctcattgaggctcctggtgaaaaaggaaataacttcagataaaaactagaaagaagttttctaagaaacagccttgtgatgtgtgcattcaccttacagagttaaaccattcttttcattgagcagtttagaaacaatgttttagtggaatctgcaaagggatattttggagcgccttgaggtgtatggtaaaaaaggaaacaacatctgagaaaaagcagaaagaaactttctgagaaactcccttgtgatgtgtgcatgtttctcacagagttaaacatttcatttcattgagcagtctggaaactctgctttttcagagactagcaagggatatatggtagcacattgaggtcaatggtgaaaaaggaaatatcttcagataaaaactagaaagaagcattctgagggactgctttgttctgagtgcattcatctcatagagtgaaacctttctttgattgatcagtttggccaccctctttttgtacatcttgagaagggatatttgggagcactttgagacctttagtgaaaaagggaatgtctccagataaacactagaaagaaactttctgggaaactgctttgtgatgtatgcattcttttcacagaggtaaacctttcttttgattgagcaatttgcaaaccctgttttggttgtatctgtgaagtgatatttgggagtacattcaggcctatggtgaaaaaggaattaccttcagagaaaaacaagaaaaaagctttctgagatactgctttgtgatgtgtgcattcatctcagaggtaaacgtttcttttgattgagcagtttggaaacatagtttttgtagaatctgtgaaggggtacttgggagtgccttgaggcctatggtgaaaaaggaaacatcatgagagaaaaagtagaaaggagcattctcagaaacttctttgagatgtgtgcatccttctcacagagttaaagttttcttttcattgagcagtctgaaaacactttttttttagaatctaggaagggatatatgagagctcaatgaggcctgtagtcaaacaggaaatatcttcagaaataaaactagaaagaagctttctgagtaactgctttgtgatgagtgcattcatctcacagagttaaaatttcctttgattgagtaatttggcaacattctttttgtagaatgtgagaagggatatttgggagtgctttgtggcctatagtgaaaaagggaacgtcttcagataaatagtagaaagaagctttctgggcaactgctttatgacgtgagcattcctctcacagtgttaaacgtttcttttgattgagcagttaacccatactctgtgtgtagaatctgagaagggttatttgggagttatttgaggcctatagtgaaaaagggaacatcttcagataaaaagtagaaaggagctttctggacaactgctttctgatgtgtgcattcatcccacagagttaaacctttcttttgatttagcagtttgcacactcggttttttttagattatgtgaagggatatttgggagtgctgtgaggtctatggtgagaaaggaaatatcttcagatgaaaactagaaagaagccttctcatacacagccttctgatatgtaccttcatctcacagagttaaagcattcttttgattaagctatttggaaaaactgttttgttaggatctgtgaagggatatttgggagcacttacaggcctattgtgaaaaagttaaatatcttcagataaaaactagtaagaagctttgtgagaaactgatttgtaatgagcaagttcatctcacagaattaaacgtttcttgtgattttgcaatttgtccagagtgattttgtaaaatctgagaagggatatttgggagcgctttgctgtctatgtggaaaaacaaaatatcttcagatataaattagaaagaagcttcccagaatctgctgtgtgatgtgggcattcttctcacagagtttaactgttctttcaattgagcagtttggaaacattgttgttgggaaatctgccaatggatatatgggagctcattgaggcctatgatgaaaaaggaaatatcttcagataaaaactagaaagaagcttcataagaaactgctttgtgatgtgtgcattcacctcacagagttaagccattattttcatggagcagtttggaaacatcgttttggtagaatctgtgaagggatatttgggaatgccttgaggcctatggtaaaaaagcaaacatcatcagagaaaaggtcgaaagagtctttctgagaaactcctttgtgaagtgtgcatatttctcacagacttaaacctttcatttcattgagcagcctggaacctctgtttttgcagaatcaaggaaggtatatatgagagcacattgaggccaatggtgaaaaggaaatatcttcagataaaaactacaaagaaggtttctgagaaagtgctttgtgctcagtgcattcatctcacagagttaaacctttcttttgatttagcagtttggaaacactctttttgtagattctgtgaagggatatttgggagcactttgaggcctatggtgaaaaaggaaatatcttcagatgaaaactagaaagaagcattcctgtaaaccaccttctgatgtgtgcattcatctcacagagttaaagtattcttttgattgagctattttgaaacactgttttggtaggatctgagaaatgttatttgggagtgcttacaggcctattgtgaaaagttaaatatcttcacataaaaactagaaagaagctttgtgagaaactactttgtgatgagcaagttcatctcacagagctaaacctttcttgtgattgtgcactttggcaaccttgctttagtaaaatctgagaaggaatatttgggagtgctttgaggtctatgttgaaaaacaaaataccttcagttataaactagaatgaagctttttcgaaatctgctttgtgatgtatgcattcttatcacagaggtaaaccattattttaattgagcagtttggaaacactgttgttgtagaatctgccaacggatgtatgggagctcattgaggcctaaggtaaaaaaggaaatatggttagataaaaactagaaagaagctttctaagaaaccactttgggatgtgtgcattcacctcacagaactaaaccattaatttcattgagcactttggaaacactgtttttgtagaatctgtcaacagatatttgggagtgcactgatgcctatggtgaaaaagggaatatcttcagattaatactagaaacaagctttctcagaaactgcttcatgaagtgtgccttcttctcacagagttaaactgttcttttgattgagcagtttggaagcactgtttttgtagaatctgtgaaggggtatacaggaacacattgaggcctatggtgaaaaaggaaatgtcttcagagaaaaactagaaagaaggtttctgagaaccagctttgtgatttgtgcattcatctcacagagttcaacgtttcatttcattcagcagtctggaagcatacttttggtagaatctgctaaggtacataaggagtgctttgaggcctatggtgaaaaaggaaatatcgtcaaagaaaaagtagagagaggctttctgagaaactcctttgtgatgtgcccattcatctcacagaggtaaacttttattttgattgatcagtctggatacactgtttttgtagaatctaggaaaggatttatgggagtacattggggcctatggtgaaaaagacaatatcttcagataaaaactagaaagaagctttctccaaaactgctttgtgacgtgggcattcttctcactgagttaagcatttcctttgattgaacagtctggaaacactgtttttctaaaatctatgaagtgatatgtgggagcaatttgaggcctattgtgaaaaaagaaatatcctcagagaaaaactagaaagaagacttctgagaaactgctttgtgatgggtgcattaatctcaaggagttaaacctttcttttgattgagcagtctggcaaaagtatttttgtagaatccgagaagggatatttaggagtgctttgagacctatggtgaaaaaggaagtatcttcagataaaaaccagaaagaagctttctgtgtaactgctttgtgatgtgtgcattcatctcacagagttaagcctttcttttgattgagcagtttggcaacatagtttttgttgaatcatgaagggacatttgggagcacattgaggtctttggtgaaaaccgaaataccttcatataaacaggagaaagaagctttctcagatgccggtttgtgatgtgtgcaatcttctcactgagttaaacctttcctttgattgagcagtttggaaacactgtttctgtagaatctgtgaagggacacttgggagcacatagaggcctatggtgaataacaaaataaccccagataaaaactagaaataaggtatctgtagaactgcattgtgatgtgtggattcacctcacacagttaaacatttcttttgatttggcatgttaaaaacactcttttctaagatctgtgaagggaagtcttggagcccattgaagtaaacgatgtggagtaaacgaatattccctgataaaaactgaaaagaagctatccgtgaaactactttgagatgtatggattcttctcacagttttaaaatttcttttgatgcagttggttggaaacacttttttggtagaatctgcaaagggacatttgcaaatccatggaggacaatggtgaaaaacagaatatcccaacataaaaactagaaactgttaatgaaactgcttggtgatgagtggattcacctcacagaggttaacctttcttttgattcagcaggttggaaacactctttctgtagaacctgcaaagggacatttgggagtccactgaggtctactttgaaaaactgaatatcgccagataaaactagaaataggttatctgtgaaactgtttgtgatgtgtggaatcatctcccaaagttaaacatttcttttgattcagcagcttggaaacactctatttgtagaagctgcgaagggacatttgagagcccgctgaggcctatggtaaataattgaatatcctgaggtaaaaactagaaagatgctatctgtgaaactgctttgtgatacgcagactcatctcaaaaagttaaacctttcttctgattcatcaggttacaaacactttttttgtaaattcagtgaagggatatttagaaatcctttgaggtctgcagtaataaaccaagtaattccagaaaaaaacaagagagaagctgtctgtaaaactgcgtttgtgatgtgtgtattcatctcacagagttactcctttctttttatactgtagcattgaaatagtctttagatagaatctgcgaatggacattttggagcccttagaggcctatgatgaaaacccaaatatatccagataaaaacttcaaagaagctatctgtgaaacttcgttgtgatgtgaggattcatttcacagagctaatcctttctttttattcagtaggttgtaaacattattttggtagaatctgtgaagggacacttgggagcccatgctgagaaatggaatatcctcagataaaaaccagaaaaaaatctacttgaaaatgctttatggttttaggtctaacatttaagtctaatccatcttgaattaatttttgtataaggtgtaaggaaggaatccagtttcagctttctacacatggctagccagtttcacagcaccatttattaaatagggaatcctttccccatttcttgtttttgtcaggtttgtcaaagatcagatagttgtagctatgtggcattatttctgagggctctgttctgttccattggtgtatatcactgttttggtaccagcaagatgctgttttggttactggagccttgtagtatagtttgaagtcaggtagcatgatgcctccagctttgttcattagacttaggattgacttggctatgcggacttttttttttgttccatatgaactttaaagtagtttttcccaattgtgtgaagaaagtcgttggtagcttgatggggatggcattgaatctatcaattaccttgggcagtatggccattttcatgatattgattcttcctacctatgagcatggaatgttcttccatttctttgtatcctcttttatttcattgagcagtggtttgtagttctccttgaagagatccttcacatctcttgtaagttggattcctaggtattttattctctttacagcaattgtgaatgggatttcactcatgatttggctctctgtttgtttgttattggtgtataagaatgcttgtgatttttgcacattgattttgtatcctgagactttgctgaagttgcttatcagcttaaggagattttgggctgagatgatggagtgttcttgatatgctatcatgtcatctgcaaacaaggacaattttatttcctcttttcctaattgaataccctttatttctttctcctgactgactgccctggccagaacttccaacactatgttggataggagtggtgagagagggcatccctgtcttatgtcagttttcaaagggaatgcttccagtttttgcccattcagtatgatattggctgtgggtttgtcaaagatagctcttattattttgagatacgtcccatcaatacctaatttattgagagttttagcatgaagtgttgttgaattttgtccaaggccttttctgcatctattgagataatcatgtggtttttgtctttggttctgtttacatgctagattacatttattgattcacgtatgttgaaccagccgtgcatcccagggatgaagcccacttgatcatggtggataagtttttgatgtgttgctggattcggtttgccagtatttcattgaagatttttgcattgatattttttgcattgaccaatcttgcattgatgggatattggtctaaaattctcttttttgtcatgtttctgccaggctttggtatcaggatgatgctgacttcataaaatgagatggaaaggattccttcttttttactgattggaatagtttcagaaggaatggtaccagctcctctttgtacctctggtagaattcggctgtgaatccatctggtcctggaccttttttctttggtaaactattaattattgcctcaatttcagagcccgttattggtgtattcagagattcaacttcttcctggtttagtcttgggagggtgtatatgtcaagggatttatccatttcttctagattttgtagtttttttgtgtagaggtgtttatagtattctttgatggtagtttgtattactgtgggattggtggtcatatcccctttatcactttttattgcatctatttgattcttctctcttttcttctttattagtcttgctagtgttctatcaattttgttgatcttttcaaaaaccagctcctggattcattgattttttgaaggtttatttgtgtctctatttccttcagttctactctgatcttagttatttcctgccttctgctagcttttgaatatgtttgctcttgcttctatagttcttttaattctgatgtcagggtgtcaattttagatctttcctgctttctcttgtgggcatttattgctataaatttccctctactgactgctttgaatgtgtcccagagaatctggtatgttgtgtctttgttctcattggtttctaagaacatttttatgtctgccttcatttcgttatgtacccagtagtcattcaggagcaggttgttcagtttccatgtagttgagtggttttgagtgagtttcttaaccctgagttccagtttgattgcactgtgatctgagagacagtttgttataatttctgttcttttacatttgcttattagtgctttacttccaactacatggtcaattttggaataggtgtggtgtgttgctgaaaagaatgtatattctgttgatttggggttggagagttctgtagatgtctattaggtcctcttggtgcagagctgagttaagttcctggatatccttgttaactttctgtctcattgatctgtctaatgttgacagtggggtgttaaagtctcccattattattgtgttggattctaagtctctttgtaggtctctaagtactagctttatgaatctggatgctcctgtattgggtgcatgtatatttaggatagttagctcttcttgttgaattgatctctttaccattacgtgatgtccctctttgtctcttttgatctttgttggtttaaagtctgttttatcagagactaggattgcaacccctgcctttttttgttttccatttgcttggtagatcttcctccaaccctttattttgagactatgcgtgtctctgcataaaaaccgaagaagaaaacctaggcattaccattcaggatgtagccatgagtaaggacttcatgtctaaaacaccaaaagcagtgtcaacaaaagccaaaattgacaaatgggatctaattaaaaataaagagcttctgcacagccaaagaaactaccatgagagtgaacaggcaacctacagaatgggagaaaatttttgcaatctactcatctgacaaagtactaatatccagaatctacaatgaactgaaacaaatttactagaaaaatcaaacaaccccgccaaaaagtgggcgaaaggtataaacagacccttctcaaaagaagatgttaaagcagccaagagacacatgaaaaaatgctcatcatccctggccatcagagaaatacaaatctaaaccactatgacgtaccacctcacaccagtcagaatggcaatcattaaaatgtcaggacacaacaggtgctggagaggatgtggagaaataggaaaacttttacactgtttttgggactgtaaactagttcaaccattgtggaagtcagtgtggcaattcctcagggatctagaactagaaataccatttgacccagccatcccattactgggtatatatccaaaggattaaaaatcacacagctataatgaaacatacacaggtatgtttattgtgcattattcacgataggaaagacttggaaccaacccaaaagtctaacaatggtagactggattaagaaaatgtgtcacatatacaccatggaatagtatacagccataaaaatggtgagtttatgtcctttgtagggacatagatgaagctggaaaccatcattctcagcaaactatcacaaggacaaaaaaccaagcactgcatgttctcactcataagtgagaattgaacaatgagaacacatggacaaaggaaggggaacatcacacaccagggtttgttgtggggttgggggagggtggtgggatagcattagtagatttacctaatgttaaataacaagtaaattagtgcagcacaccaacatggcacatgtatacatatgtagctggcaccttgtgcacatgtaccctgaaacttaaagcataataaaagaaaagcaatttgagtaactaaaattctgaaaaattaaaaaaaatattctgtgatgtgtggattcatctcacagagaaaaacctttcttttgattctgcaggttggaaaagttctttggatagaattatagagggaaaattgggagcacatagaggcctgtggtgaaaaactgaatatccccagataaaaactagaaagaagctatatgtgaaggttctttttgatgtgtggaatcatctcttaaagttaaacctgcctttttgattcaggagtttgcaaatacttcttttgcagaatctgcgaagggacatttgagagccctttgaggctcatggtgagaaaccgaatatcaacagataaaaactagaaggaagctatctgtaaaactgcttcataatgtgtggattcatctcacagagttaaacatacattttcattctggaagttggaaggtgctttaggtgcaatctgcaaagggacatttgggagcccattgatgctgatgatttaaaacaaaatattccaagataaaaactagaaaaaactatctttgaaacggcattgggatgcgtggattcatctcacagagttaaatttctcttttgattcagcaggctggatagacttttttcgtataatctgtgtagggacatttgggagccatttcacacctgtcatgaaaaaccaaatatccccagataaaactagacagaaactatctatgaaactggattgcgatgtgtggattcacatcattgatataaacctttattttgattctacagattgcaaaactctttcagaagaatctgcaaagggacatttggaagcccatagaagccaattgtgaaaaagcaaatagtcccagatgaaaactagaagaagctatatttgaaactgcattgtgatgtggcgattcatctcacagagttaaacctttctttgggttcagcaggtttgaaacactcttttggtagaatctgtaaagggatacttgggagactatagaggcctattttgaaaagccaggtatctccagataaaaactagaaggaagctacctgtgaaactgttttgtgatgtgtgtattcatcttatctcacagagttaaaactttcttttgattcagtaggtggtaaacactcttttggtagaatctgcaaagtgacatatcacaacccattgatgcctatggtgaaaaaacggatatccccatataaaaactagaaagaaggtatttctgaaactgcattgtgatttgtgcatttatctcacggagttaaatatttctattgattcagcataatggaagcaatctttttgtagaatctgcaaagggacatttgggagcccttttactgctatggtgaaaaatcgaatatccccagacaaaaacaagaagcaagctatctgtgaaactgctttgtgatgagtggattcatctcacaggttttaaccttttgttttactcagtgagttgaaaacactctttttttttagaatctaccaagggacacatgggaacccacaaaggcctatggtggaaaagtgaatatccccagataaaaactaggaacaagctgtctgtgaaactacattgtgatgtgtggtttacttcccacagttaaacatttcttttgattcagcaggttgcaaacactgttttaatagaatctgtgaaggtacatttgggagactattcaggcctatggtgaaaaaccaaatacattcagaaaaaaacctgaaagaagctatctgtgacactgctttttgatgtgtggattcatctcacagagttaaacacttctttagatacagcagtgttgaaatattctttaaatagaatctgccaagagacgtttttaagcccatataggcctaagttgaaaaacagaatatcaccagataaaaactagaaacaagctattggggacatttctttgtgacatgtggattcccccacagagttaaaacttttttgacttagcactttataaacactcttttcttgaaactgtgaagggaaatttgtgagcccattttagcctatggtgaaaaatggaatatcccaagataaaaaccagaaagacgctatcagtgaaactgttttggatgtttcgattcacctcacagacttaaaccttcttttgattaagcaggttggaaacactcttttggtaaaatctgcagagggacatttgggagccctttaaggtcaatagtgaaaaattgaatatcaccagattataactagaaagaagccatctgtaaaactgctttgttatgtgtggattcatctcactgactgaaaactttctgtcaattcagcaggtttgaaataatctttttgtagaagccatgaaaggacatttgggagccctttgtgaataaccaaatatccccagataaaaaaataggaggaaattatctgtgaaattgctttcagatgtgtgggttcatctcagagttacatttttcttttccttcaacaggtgtgaaactatttttggtagaacctgtgaagggatatttgggatcccataggaaaaacaatatctgcagataaaaactagaatcaagccctctgtgaaactattttgtgatatgtagattcgtttcacagatttaaacctattttttgattcagcaggtgggaaacactctttgggtaggatctgtgaagggatattttggagacctttgaggcctatggtgaaaaaccaaaattccctagatacaaactagaaagaagatctcatgaaagagcattgtgatgtgtggattcatctcacagagttaaaatttttttttgattcagtagttttgaaacactgttttggtagattctgtgaagggacattttgaagccctttgaggcatatggtaaaaaccatgatttccccagatatatcaagaagaagctaactgtgaaagtgctctgtgatgtgtggattcaccttagacttaaacctttcttttgattcggcatgttggaaacattcttttggtagaaactgcaaagacatatttgggagcccattgaggcctgtaatgaaaaacaacatacccaaagataaaaactacaaagaagatatctgtgaaactgctctgtgatgtatggatttatctcacagaattaaacctttcttttgattcagctgttggaaacactcttttgctagaatctgagaaaggacatttgccagcacactgaaccctatgttaaaaaaccgaatatcccaagataaaaattagatagaagctatcaataaaatgtatttttgatgtgtagattcattccacagaggtaaacttttctttttcatttagcaggttgcaaacactccttttgtataatatactaagggatatttggaggcccattgaggtctatggagaaaacagaatatcaccagacatctgtgaactgctttgtgaggtctggattcatctcaaagaggtaaaacgttcctgaaagcagcgtgtgggaaacactcttttggtagaaactgcaaagtcctttgaggtctatggtgaaaaactgaacgtccacaaataaatattagaaaggagctgtcagtgaaattgctttgtgatgtgtggattcgtcccactgatttaaatctttcttttgatacagcaggattgaaacagtctttagttagaatctgtgaagggacatttgaaagcccatagaagccaatgttgaaaaactgaacatccaaagataaaaactagaaataagctatctgtgagcttgctttgttatgtgtggaatcatctcagagatttaaacctctcttttgattcagcaggttgcaaacattcctttgctagtatctgagaaaggacaattgaaagcccattgtagcactttgtgaaaaattgaatattcaaagataaaagctagaaagaagcttttagtgaaactacttagtgatgagtggattctactcagagagtgaaacttttctattgttcagcagtttggaaactctcttttcgtaaaactgggaaacggacatgtgggagcccattgagacctatggtgaaaaatcatatatttccagagaaaaacaagaaaaaagctatctgtgaaactgctctgtgttgtgtggattcatctcacagagttaaaactttattttgattaaggaggttggaaaaacttgtttggcagaatctgcgaaggaagctttggaagctttttgaggcctatggtgaaaaacagaatatccacagataaaaactacaaagtagctatctgtaaaactgctttgtgacttgtagcttcatctcacagaggtaagcctttcatttgatttagcacgttgaaaaccctcgttttgtagaacctgagaagggatactttgaagcccattgactcctatggtgaaaaaagaaatatccctagttcaaaactagaaggaagctacctgtgaaactgatttgtgttgcatggattcaccacttatagttaaacttttcttttgatccagcaaatctgaaacactctttagggagaataagtgtagggtcatttgggagaatgtagaggcctatggtgaaaaagagtatatcgccagataaaaactaaaaagaaagtgtctgtgaactgctgtgtgatgtgtggattcacatcacagaattaaacttttgttttgattcagcaggtgtgaaaccctcttttggtgggatctgcaaagggacatttggaagcccaaagatgtttatggtgaagaaccgaatatatctagataaaaactagaaagaaactactcgtgaaactgccttgtgatgtgtggattcgtttcacagagttaaatatgtcttttggttcagtaaattttaaacactcttggggtagaaccttttaagggacatttcagagtccttagaggcctatggtaaaaaaacaaatatccccaggtaaaaactagaaagaagctatctgttaaactgctttgtgatgtctgtattcaaatcacaaagttaagcctttctttggattcagcatgtcacaaacactctttttatagaatctgtgaaggtacatttgggaacactttcaggaatatagtgaaaaacagaatacccccagatactaaccagaaagaagctctttctgaaactgcttttttgatgtgtggattcatctcacagggttaaaccttccttagattcagcaggttggaaacgctcgttttttagaatctgcgtggggcattttgaagccatttgaggcctatgattaaaaaaaaaagacactatatccccagataaaaactaggaatcagctatcggtgaacttctttgtgacatgcagagtcatctaacagaggtaaacgtttcttttgaaacagcgtgctggaaacattgtttttgcagaaactgcaaagacaaatttggaagcttttagaggcctatggtgaaaaacagaatgttcatagataaaaactataaagaagctatctgcaaaacaaccctgcgatctgtggattcatctcacagagataaacccgtctattgaatcagcaagttgcaaacactctttttgtataatctgcaaagaaacttttggagtccatggaggcctatagtgaaaaacggagtatccccagataaacactagaaaaaagctatctttgaaactgctttgtaatgtgtggattcatctcacagaattaaaccttttcttttattatccaggtttgaaactctcttttggtagaatttgtgaaggaaggtttgggaagccatagaggcctatggtgaaaaacagaatatccccagataaaaactagaaaaagctgcctgtgaaactgcttcatgatatgtggattcatctcaaagggttaaacttgtttttgattcactagattagaaacactctttttctggaatctccgaaggcacattttgcaggccactgtagtctatggtaacaaacagaatatcccaagctcaaaactagaaagaggctatctgtgaaacttctttgtgatgtgtggattcatcccagagaagtgaacctttcttttaattcagcaggttgcaagcacacttttgcagagtctgaagagacttttgaaagctgtttgagtcctttggtgagaaacaaaatgtccacagataatcacagggataaaactatctgttaaactactttttgatatgtggtttcatctcacagtgttgaacctttcgttttactcagcaggttggaaacactctttggttagaagttatgaggaaacatttgggagctttttgaggcctattctgagaaactaaacatccccagataaaaactagaaaaaagctatctttgaaactgctttgtgatgtgtgtattcatcttacagagctaaatttttattttgacacagcaggtttgaaactctctttaggtagaatctgcaaaggtatatttgggagtgccttgaggcttacagtgaaaaataaaatatccccagataaaaactagaaagaaactatctgtgaaacttctttgtaatgtgtggattcacctcacagagttaaacctgtcttttcattcagcaggttggaaaccctctttttggagatcctgccaaaggacgtttgtgagccctcagaggcctgtggtgaaaaacagaatatccaatgataaaaactagagaaaacgtatcaatgaaactgccttgtgatatgtggattcatctcacagagctaaacatttcttttgattcagtatcttggaaacacttgttgtgtagaattggtggaaagacatttgggagccaatagaggcctaaggtgaaaaactgaatatccccagataaaaactagaaagaaactatctgtgtaactgctttcataagtgtggattcctctcacagagttaaacctttcttttagattcagcaggttgcaaatacttatgttttgtaatctgtgtagtgacatttgggagcccattaaagcctatgatgaaaaatcaaatatccccagataaaaaccaaaaagaagctatctttgaaactgtttagtgatgtgtgggttcatctcaaagtcttaaatctttcttttgactcagcgtgttggaaacactcttttgctagaatctgcaaaagatttttgagcccactgtagtctagggtaaaaaaaccccacaaatattgcagaataaaaactagaaagaagctatcagtgaatctgctttgtgatgcatggattcatttcacagaattaaacctttattttgatacttcaggttggaaacacttttttgtagaatctgtgaagggacatttgagagagatttgaggcctataatgaaaaactgaaaatccccagataaaacctagaaggaatctctttgtgaaactgtttgggatgtgtttattcagctaatagagttaaaattttctgccaatataacatgtttgaaacaatatttagatagtatctgtgaagggacatttaagagcccataaaggcctatggtgaaaaaaagaatatcgccagatataaagtagaagaaagctaaagatgtaactcctttgagatgtatggattcatgtcacatagttaaaactttcttttgtcacagcaggtatgaaaccctctttagttatcatctgtgaagggactttcaagagcccatagaggcctatggcaaaaaactcaaaaactccagataaaaactagaaggaagctctgtttaacttgtttgtaatgtctggatttatctcacagagatacaattttatattgattcagaaagttggaatcactcttttggtagaatctgccaagggacatttgggatcccttaaaggcctatggtgaaaaactgaatacaccttgataaaaactaggaagaagctatctgtgaaattgcattgtaaagtgtggattcatgtcacagagttaaacatttgttttgattcatcaggttggaatcactgattttgcagattctgtgaagagacattgtagagcctattgagtcctatggtgagcaacccaatatttccagataaaaaccagaaggaagctatttgtgaaactgttttgtgaggtgcgattcatctcacagatgtaaacactttttttgattcagtaggttggagatactcattttgtagaattggcaatgggatatttcagggcccattgaggcctaagcttgcaaacccaatatcccgagataaaaactaaaaaggagctgtcagtgaaactgctttgtgatgttgggatttattttacagaattaaacacttcttttgacttagcaggttgtaaacactcttttcgtagaatctgcatagagacatatcacagcccattgaggcctatggtgaaaaaacagatatccccagataaaaactagaaagaggcatttctgaaactgcattgtgatgtctgcatttatctcacagaggcaaatctttgtattgattcagcaggatggaaaaactctttttgaataatctgcaaagggatatttgggagatcttttaggcctgtggtgaaaaataaatatccccagataaatactgcaaagaactgaagagtgacacagcttttctgatgtgtggatttatctcacagacttaaacctttcctttcattctgcaggtttgaaacactcattttgcagaatctgtgaagggacattatagagccccttgaggtctattgtgaaaaataaaatatcctcagataaaaactagaaagaagctgtctgtgaagtgctctgtgatgtgtggattcattgcacagagttgaaactttcttttgatgcgccaggatggaaacactctttagatattatctgcaaaggaacatgtattagcccatacaggcctagggtgaaaaaacgaatatccccacataaaaactatcaagaagctatctgtgaaactgctttgttaagtgtagattcagctcaaagggttaaacctttctttggattcagcaggttgcaaacactcttttgctagaacctgccaagggacatttgtgagcccattgttgctcactgtgagaaatggaatattcaaagacaaaaactagaaagaagctttctgagaaactgctttgtgatgtgtgcattcttctcacagacttaaacctttcatttgattgagcaattttggaaacactgtttttgctgaatctacacagggatatatgggattgcattgaggcctatggtgaaaagagaaatatcttcagataaaaaatagaaagaagctttctgggaaactgctttgtgatgtgtgcattcaccacccagagttaaacttttttttgattgagcagtttggatacactgtttttgtaaaatctgtgaagggacatctgggagtgcttggaggcctatggtgaaaaagtaaatgtctttagacaaaaagtagaaagactctttctcaaaaaccgcttagtgatgtgtggactcttctaacagtgttaaactgttcttttgtttgaacagtttggatacactgttttggtagaatctgtgaagggatatttgggagtgcattgtggccttttgtgaaaaagaaatatcttcagggaaaaactagaaagaagctttcagagaaactgttttgtgatgagtgcattcagctcacaaacttaaaactttcttttgattgagcactttgcaaacactgcttttgtagaatgttcgaagggatatttgggagccattagaggcctatattgaaaaaggaaatatgtttgagaaaaactggaaagaagtttctgcataactgctttgagaagtgtgcattcatctcacagagttaaacttatagtttgagaagattggaaacactgttttggtagaatctgtgaacagattttttggagtgctttcagacctatgatagaaaaggaattatcttcagataaaaactagaaggaaacattctgagagatggctttgtgatgagcacgtttatctcacagagttaaacctttattttgattgagcagtttggcaactgtgttttgtaggcactgagaagggctaattaggagtggttttaggcctatggtgaaaaccgaaatattgtcagttagaaacaagtgagaagatttctgggcaacttctttgtgatgtgtgcattcatctcacagagttaatcctttcttttgattgagcagtgtggaaacactgtttcagtagaatctatgaagagatatttgagtgcactgagtgctatggttcaaaaagaaatatattcagctaaaacttaaaaggtttctcagaaactgctttgtgatgtgtgcatttttctcacaaagttaaacatttcttttgattgagttgtctggaaacattgtttttgtagaatatacaaaaggatatatgtgagagctttgaggcctatggtgaaaaaggaaatattttcagttaaaaactagaaagaagctttctgagaaactgctttatgatgattgcattcatctcacagataaacctttcttttgattgaccagtttggaaacactgtttttgtagattctgtgaagggacattctggagcacattgaggcctatggtgaaaaaggaaaaatcttcagataaaaactagaaagaagctttcttaggaaccactttttgttgtgttcattcttctcacagagttaaaactttcttttgattgaatagtatggaaacactgttttcgtagaatctacaaagggatatatgggagcccattgacacctatgatcaaaaaggaaatatcttcagataaaaactggaaagaagctttctgagaaactactatgtgatgacagcattcgtctcatagagttaaacctttcttttcattgagcagtttagaaacacagtttttgtagaatgtgagaagggatatgtgggagggtttgaggcctatggtgaaaaacaaaatgtcttcagataaatactagaaagaagctttctgggtgactgccttgtgatgtgtacactcatgtcacagagttaaacattattttttgattgatcagtttggaaacactcttttggtagaatcaatgaagagatatttgggagcgtattgagctctatggtgataaaggaaatatctttagataaaaactagaaagaagctttctcagaaagtgttttgtgatgtgtgcattcttctcacagagttaaacctttcttttcattgagcagtctggaaacactgtttttgtaggatctatgaagagatatatgggagcacattgaagcctatggtgaaaaaggaaatgtcttcagataaaaaatagaaagaagctttctgagaaactgctttgtgatatgtgcattcatgtcacagagttagacctttcttttgattgtgcagtttcacaacattgttgttgtggaatctaagaggggatatttgggagtgctacaagaccttgaatgaaaaaggaaatatcttcagataaaaattagaaagaagctttctgggaaactgttttgtgatgtgtgcattcatttctcagaggtaaaacttttttttgatagagaagtttggaaaacgtatgtttgtataatctgcgaagggacttttgggattgatttgaggcctatgctgaaaaaaggaaatatcttcagataaaaagtagaaagaagctttctgagaaactgctttgtgatgtgtgcatttatcccacagaattaaaacttccctttgattgggcagtttggaaacacagtttttgaggtacctgtgaagggttatttgggagcacatcaagatctatggtgaaaaaggaaatatcttcagataaaaagtagaaagaagctttctcagaaccgctttgtgttgtctgcattcttctcacagagtcaatcctttcttttgatagagcagtttttaaaacctgattttatagaatctgtgaaggcatatatgggagcccataaggccaattgttaaaaagataatatcttgagggaaaaactagaaagaagctctctgagaaactgccttgtgatgtgtgcattcttctcacagagttaaacctttcttttgattgagcagtctggaaacactgttttcgtaggacctatgaagagatatatgggagcgcattgaagcttatggtgaaaaaggaaatatcttcagataaaactagaaagaagctttctaggaaactgcgttgtgatgtgtgcattcatctcacagagttaaacctttcttttgattgtgcagttttgcagcattgttgttgtggaatctaagaagggatacttgggagtgcaataagaccttgaatgaaaaaggaaatatcttcatataaaaattcgaaagaagctttctgggaaactgttttgtgatgtgttcattcatttctcagagttaaacctttttttttgatagagaagtttggaaaccgtgtgtttgtataatctgcgaagggatgtttgggatcgatttgaggcctatggtgaaaaaaggaaatatcttcagataaaaactagaaagaagctttctgagaaactgctttgtgatatgtccattcatctcacagaattaaaacttccttttgattgggcagtttagaaacacagtttttgaggtatctttgaagggataattgggagcgtattgagatctatggttaaaaaagaaatatcttcagataaaaagtagaaagaagctttctcagaaactgctttgtgatgtctgcattcttctcacagaattaaacctttttttttgattgagcagtttggaaacactgtttttgtagaatctacacagggatatattgaagagcatggaggcctatggtgaaaaaagaaatctcttcagataaaaagtagaaagaatttttttcagaaactgctttgtgatgtggacattcctctttcagagttaaaccattcttttgattgagcagtttggaaccactgtttttgtagaatctatgaagggatatatggaagggcattggcacttgtggtgaaaaaggaaatatcttcatagaaaaactggaaagaaactttctgagaaactgctttgtgatgtgtgcattcatctcacaaagttaaaccattcttttgattgagcagtttagaaacactgtttttgtggaattttcaaagggatatttgagagtgctttgaggtctatgctgaagaaggaaatgtcttcagataaatactagaaagaagctttctcaaaaaccgctttgtgcctttgtgcgttcttctgacagagttaaatctttcatttgattgaggaaattggaaacactgtttttgtagaatctgagaggggatatttggaggcactttgagaactatagtgaaaacagaaatatcttcagataaaaagaagaaagaagtttctcagaagctgcattgtgatgtgtgcattcttctcacagaattaaacctttcttttgatagaacagtttggaaatactgtgtttgtagaatctacacagagatatatgagagcacattgagtcgtaaggtgaaaaaggaaatatcttcagattaaaaatagaaagaaggtttctaatatgtgcatttctctcacagagataaacttttttgattgtgtggtttgtaaacactttttgtaaaatcaataagggatatttcagagcactttgaggcctaaggaagaacaagaaatgtgttgagataaaaactagaaagaagatttctgagaaactgctttgtgatgaatgccttcatctcacagaattaaaactttcttttgattgaacagtgtggcaacacgctttttgtggattccgaaggggatattttggagtgctttaaggcctaagtgaaaaggaaataccttcagataaaaattagaaagaagctttgtaggaaacggctttgtgatttgtgcattaatctcaaaaatttaaaacagtattttgattgagcactttggaaacactgttttggtggaatctgtaaagggatatttctggaaagatgcattctggtaaactgctttcagatgtgtgcattgatctcacagagataaaattttctttggattgagcagtttggaaacactgttttggtaggatctgtgaagggatatttgggaacacattgaggcctacaatgaaaaaggaaatatcttcagataaaatctagaaagaagcttttgagaaagtgctttgtgatgagtgaattcatctcccagagttaaactttccttttcattgagcattttggcaatactctttttgtggaatctcagaagggatatttgggagctctttaaggcttagggttgaaaaaggaaataaaatcagataaaaactacaaagaagctttctgagaaactgctttgtgatgtgggtattcatcttacagaattaaaccgttcttttgattgagcagtttggaaccattgtttttgtagaaactatgaagggatatatgggagggcattgatgcctatgttgaaaaaggaaatatcttcatagaaaaactggaaagaaacatcctgaggaactgctttgtgacgtctgcatatatctcacaaagttaaaccattcttttgattgagcagtttggaaacacagtttttgtagaatttgcaaaggggtattttggagtgcttcgaggcctatgctgaagatggaaatatcttcagataaataccagaaagaagctttctcagaagccgctttgtgatgtgtgcattcttctcactgagttaatcctttatttcgattgtgcagtttggaatcactgttttggaagtatttgcaaagggatatttaggagtgcattgaggtctatggtgaaaaaagaaatatcttctgataaaaactagaaagaaactttctcagaaaccattttgtgatgtgtgcattcttctcatagcgttaaaactttttttgattgagcagtctggaaaaactgtcttggtagaaactataaagggatacatgtgagcatcttgaggcctatgggaaaagggaaatatcttcagagaaaaactggaaggaaacattctgagaaactgctttgtgatgtgtgcattcatgttacagggttaaaacttcctttttattgagcagtttggaaacactggtagaatctgtgaagagttatttgggagctctttgaggcctatggtgaaaaaggaaatatcttcagatacaaactagaaagaagctttctttgaaacttctttgtgatgagtgcattcatctcacagaggtaaaactttcttttgattgagcagtttggcaacactgattttgtaaaatatgagaagtgatatctgggagtggtttgaggtctatggtgaaaaaggaaatatcgtcagataaaaactagaaagaagctttctgggaatctgctttgtgatgtgtacattcatctcacagagttgaacctttcttttgattgatcatttcagaaactgcttttgtagaatctgtgaagggatatttgggagcattttgaggcctatgctgaaaaaggaaatatcttcagatgaaaactacaaagaatgtttctgagaaactgctttgcaatgagttcattcgtctcacagagttaaacatttcttttcattaagcagtttggcaacactattttttgtagaatctgcaaggtctatggagaaaaagaaaatatcttgagaaaaaactagaaagaagctttctgagaaactgctctgtgatgagttcattcatcacagagagttaagcctttctcttgattaaacagtttggacacactgtttttgtagaatctgtgaaggattattttgtattgccttgaggcctgcggtgtaaattgaaatatctttagataaaaactagaaagaagctttctcagaaactgcttggttatgtgtgcattcatttaacatagataaactttttttgattgagcagtttggcaacactatttttgtggaatctgcaaagggatatttgggagtgctttgaggcctatggtgaaaaaggaagtatcttcagacaaaaactgcaaagaagctttctgagaaactgcgttgagatgtgtgcattcttctcacagaggttttttgtttgtttttttgtttgtttgttgaccagtcttgaaacactgatttgtagaatctgcatagagatatttgggagcagattgaggcctatggtgaaaaaataaatatctttacataaaaactagaaagaagctttctaacaaaccactttgtgatgtgtgcattcttcacacaaagttaaaactttcttttgattgaacagtctggaaacagtctttttgtagaatctacgaagtgatatataggagtggatgaggcctgcagtgagaaaggaaatgtcttcagagaaaaactagaaagaagcattctgagcaacttctttgtgatttctgcattcatctcccagagttaaatctttcttttgattgcacagtttggaaacactgttttggtagaatctgtgaaaggaaatttgggagtgcattgaggccaatgagaaaaaggaaatatcttcagataaaagctacaaagaagctttctgagaaactgccttgtgattagtgcattcgtttcaaaggtttaaacctttcttttgattgagcagtttggcaacactctttttgtggaatctgagaagggatatttgggagtgtttcaagatctagggtgaaaaaggaaatatcatcagataaaaagtacaaggagttttctgggaaactgctttgtgatgtgtgcattcatctcacacagttaaacctttttttgattgagcagtttggaaacactgtttctgtaaaattctccaagggatatttgggagggctttgagtcctatggtgaaaaaggaaatatccttagatacaatctagaaagatttctgagaaacagctttgtgatgtgtgattttgtctaacagactaaatcctttcttttggttgatcagtttgaaaactgtttttctacaatctgtgaatgcatattttggagtgcattgatgcctatggtgaaaaaggaaatatctttacataaaaaactataaagaaatttctgaaaaacagctttgtgatgtgcatattcatttctcagagttaaaactttcttttgattgaggaatttgtaaacactgtttttgtataacctgcgaagggctgttagggagagcattgaggcctatggtgaaaaagaaaatatcttcagataaatattgaaaagaagcttccaaagaaactgctttgtgatgtttgcattcatctcacggagttaaagctttattttgattgaccagtttggaaacactgattttgtattatctttgaaggcatatttgggagtgcattgtggagtatggagaagaagaaaatatcttcagaagaaaaccagaaagaagctttctgagaaactgcattgttatgtgtgcattcatctcacagagttaaaactttcttttgattgagcaggttggaaaccctgttgttggagaatctgtgttgggatattagggagtgccgtgaagcctatggtggaaaaggaaatatctccagataaaaactagaaagaagctttttgaaacactgatttgtgatgtgtgcattcatctcacagagataatcctttcatttcattgagcagtttggaaagactgtatttgtagaatctgcaaaggcatatttgggagcacactgaggcttacagagaaaaaggatacaccttctgataaatctagaaatacgctttgtgagaaactgctttgtgattggggcattcatctcacagagttaaacctttcttctcattgagaagtttggaaacactgtttttgtggaaactgtgaaggagtatttgggactgatttgaggcctatagcaaaaaaggaaatatcttgagataaatttagagagaagatttgtgagaaactgctttgtggtgggtgcattcatctcacatatttgaatctttctattgattgagcagtttggaaacactctttttgtagattctgcaaaggtatatttgggaatgccttgaggcctatggtgaaaaaggaaataccttcagatgaaaactagaaagattcctgagaaacagctttgggatgtgctcattcttctaatggagttaatactgtcttttgatagcgctgcttggaaacactgtttttgcagaatctgtcatgggatatatgggagcacatcgaggcctaaggtgaaaaaggaaatatcttcacataaaaactagaaagaagctttctcagaaaccgttctgtggtgtctgcattcatctcacagatttatagtatgttattttattgaccagtatggaaactgattttgtagaatttgtgaagggatatttgggagcacattgaggtctatggtgaaaaaggaaatatcttcatatgaaaactagaaagaagctttctgaggaactgctttgtgataagtgcattcatctcagatattccaacttttctttagattgaccagtttggaaacacagtttttgtagaatctgcgaagggacattttggagcccatggatgcctaggctgaaaaactaaatatcttcagataaatactagaaagaagctttctcagaaactgttttgtgatgtgtgcattcttctcagagagttaaacctttctttagattgagcactttggaagtacggtttttgcagaatctgtgaagggctaaatgggagtgcattgaggcctattgtggaaatggaaatatttaaagtgaaaaactagaaagaggctttctgagaaaatgctttgtgatgtgtgcattcttctcgcagagttaagcctttgttttgattgtgcagtttggcaacgctgttattgtggaaactaagaagggatatctgggaacactttaagaactaaggtgaaaactgaaatatcttcagataaaaaggataaagaagtttaatgcaaaactgatttctgatgtaggcattcatctcacagagttaaacttatttttaattgagccatttggaaacactgtttttgtagaatctgtgaagatatatttgggagtgctttgaggcctatggtgaaaaaggaaatatcttcagataaaaagtagaaagaagctctttgagaaactgcttgtgatgagttcattaacctcacagagttaaaactttcttttgattgagtagtttggaaacactgtttttgtagaatctgtagaatcctcgaatggatatttgggagcatttagaggcctttggtgaaaaaggaaatatttttgagaaagactagaaagaaactttctgagaaactgctttgtgatgtgtgcattcacctcacagagttaaacttatctttgcatgagcagtttggaatcactgttttggtaggatctgtgaatggatatttcagagcacttacaggcctatgataaaaaaaaggacgtatcttcagataaaaactagaaagaaggtttctgaaaaactgctttgtgatgagcacattcatatcacagagttaaacctttcttttgattcagcaggttgacacagagtttttgtagaacctgacaagggatatttagcagtgctttgaggcctattgtgaaaaatgaaatatcttctgatagaaactagaaagaagctttctgggaaactgccttgtgatgtgtgcattcatctcacaaagttaaacctttcttttgattgagcagtgcagaaacactgttttggtagaatctgtgaagagatattttgggacatacttgggtatatgtttaaaaaggaaatgtcttcagataaaaactggaaagaagctttctaagaaactgctttgcaataagtgcattcatctcatggagttaaaaacttcttttcattgagcagtttgggaacagagtttttgtagaatctgagaagggatatttggtaatgctttgaggcctatggcaaaaatcaaaatatcctcagttaaaaactagaaagaaattttctgagaaactgaattgtgatgagtgcattcgtctcaaagagttaaacccttcttgtgattgagcagttggaaacactcttttggtaaaatctgcaaagggatatttgggaatgctttgaggcctatggtgaaaaaggaaatagcttcagaaaaacactaaaaagaaggtttctcagaaactgctttgctttgtatgcatatttctcaccgagttaaacctttgtattgattggccagtttggaaacactgtttttgtagaatatgcaaaggaatatatgggagcccttgaggcctattgtgaaaaaggaaatatcttcatggaaaaactggaaggaagccttctgagaaactgcgttgtgatgtgtgcattcagctcacagagttaaacctttcttttgattgaccaggttggaaacactcttctggtataatctgtgaagggataattgggagcatattttcatctatggtgaaaaaggaattatcttcagagaaaaactagaaagaagtttcctgagaaactgctttttgatgagtgtattaatttcacagggtgaaacctttcttttgattgagcagtttggaaacaatgttttattagaatctgagaaaagatatttgggagcgctttgagtcctatggtgaaaaaagaaatatctgcagataaaaatataaagaagattttgggaaactgctttgtgatgtgtgcattcatctcacagagttaaacctttcttttgatagagcagttcggaaacactgtttatggagaatctgtaaagggatatttaggcatgcattgaggcttatgttgaacaaggaaatatcttcagagaattactagaaagaaactttctctaaaaccacttgtgagatgggtattcttctcacagagataaacctttcttatgactgagtagtttggaaacactgtttttgtaaaatctgtgaagggatatttgggagtgcattgaggcctatgttgaaaaaggaaatatcttcagagaaaaacaagaaaaaagctttttgggaaaatgctttgtgatttgtgtattcatctcacagagttaaatctttctgtttattgagctgtggttgaaaacactcttttagtagaatctgagaagggaccttagggagcccattgaggcctttggtgaaaaaccaaatatcccaagataaaaattataaagaagctatctgtgaaattactatgtgatgtatggattcatctcacagttttaaaactttcttctgatttaatgggctggaaaccctatttttgtagaatctgtgaagggaaatttgaaatccctttgagggcttatgaaaaacaaaatatccccagataaaaacaagaaagaagctatctgtgaaactaacttgtgatgcgtggattcgtctcacagagttaaacctttcttttgattcagcaatttgcagacactcctttttggaatctgtgaaggaatatttgggagcccatttcagcttatggtgaaatatcaaatatccccagataaaaactagaaagaagctaactgtgagacttctttgtgatataggattcatgtcacaaggttaaaactttgttttgacttagcgagttggaaatattttttgacaaaatctgttgaggtacttggaaacagtgcttttgtagaaacagtgaatggatatttgggactgctttaaggcctatggtgaaagaggaaatgccttcagagaaaaactcaaattaagctttctgagagactgctttgtgatacatgcattcatctcatggagttaaacatttattttgattgagcagtttggaaacactgttgtggtagaatctgtgaagagatatttgggagcactttgaggcctatggtgaaaaactcaataactccagataaaaactagaaagaactatctgtttaacttatttgtaatgtctggatttatctcacagaggtaaacctttatattgattcagcaagttgaaatcactcttttgatagaatctgccaagggacatttcagatcctttagaggcctatagtgaaaaactgaatataccttgataaaaactagaaagaagctatctgtgaaacttcattgcaaagtgtggattcatgtcagagttaaatatttcttttcattcatcaggtgggaaacactcgttttgtagattctgtgaagatacattttggagcccattgagtcctatggtgaacaacccaatatttccagataaaaaccagaaggaagctatctgtgaaactgctttaagacacgtgattcatctcaaagaattaaactttatttttgattcaataggttggagacactcattttgtagaattggagacatgatattttggatcccattgtggcctatggtcgcaaacccaatatcccaagataaaaactaaaaaggagctgtgagtgaaactgctttatgatatttggatttatctcacagagttaaactgttcttctgattcagcaggttgtgaacactctttttgtagaatctgcatagggacctatcacagcccattgaatactatggtgaagaaatggataacccgagataaaaaccagaaagaagctatttctgaaagtgcattgtgattcttgcatttatctcacagtgttaaatctttctattgattcagcaggatggaaacactctttagataaaatgtgcaaatgaacatttataaactcatagaggcctgtggtgaaaaacagaatatccccacataaaaactatcaaaaactatctgtgaaactgctttgttaagtgtggattcagctcaaagggttaaacctttctattgattcagcaggttgcacacgctcttttgctagaatctgcaaagggacatttttgagcccattgtagcacactgtgaaaatggaatattcaaatataaaaactggaaagaagtttttagtgaaacttcttggtgatgtgtggatgctactcacagagtttaacttttctattgattcagcagtttggaaacactcttttggtaaaagcagaaaatggacatgtgggagaactttgagacctatggtaaaaaaaaaaaaatatttccagataaaaattataaagaagctatctgtgaaactgctctatgatgtgtggattcatctcacagagttaaacatttcttttgattcggcaggttggaaacactttcttggcagaatctgcaaagggagatttagaagatttttgaggcctatggtgaaaaacagaatatccacagataaaaactacaaagtagctatctgtgaaactgctttgtggtgtgtggactcatctcccagagataagcctttcctttgattcagcactttggaaacactcgttttgtagaacctgagaagggacattttgaagccgactgagcattggaagctttttgaggcctatggttgaaaacagcatatccacagataaaaactacaaagtagctatctgtgtaactactttgttatgtgtggattcatctcacagagttaaacttttcttttgtttcagcaggctgcaaatatttatgttttgtaatctgcatagtgacatttgggagcccataaaagcctatggtgaaaaatcaaatatccccagataaaaatcagaaagaagctctctttgaaactgctttgtgatgtgtagattcatctcaaagacttcaacctttcttttgactcagcatgttggaaagactcttttggtagaatctgtgaaaggagatttgtgagcccactgtagtctatggaaaaaaaacaaatatttcaaggtaaaaactagaaataatctatcaatgaatctgctttgtgatacatggattcatatcacagagttaaaactttcttttgatttagcaggttggaaaatcctctttgtagaatcttcgaagttacattttagagatctttgaggcctataatgaaaaaccgaaaatccctagataaaaactagaaggaagttctttgtgaaactgtttgggatgtgtttattcatctaacagaattaaacctttctgtcaatatagcatgtttgaatcacatttaaggtagtttctgtgaagggacttttcaaagcccttacaggcctatggtgaaaaacagaatatctgcaaacaaaaagtagagaaaagctaaatatgtaactgcttttgatgtatggattcatctcacagagttaaacctttcttttattgtaacaggttggaaacactcttttgttggaatctgtgaagggaagtttgggaacccatcaaggcctaaggtgaaaaacagaatatccccagataaaaactagaaaaaactctctgtgaagctacttagtcatatgtggattcatctcaaagggttaaacttgttttcaattcaaggggttagaaacactctttttctagaatctgcaaaggcacatttgtgagcccactgtagtctatggggacaaacagaatatcctatgatcaaaactagaaagaggctatgtgtgaaactcccttgtgatgtgtggattcatcccaaagaggtaaacgtttcttttaattcagcaggttgcaagctgtacttttgcagagtctgagaagggacatttgaaagccctttgggttctttggtgagaaaccaaatgtccacagataaaaagtaggaagaaactatctgttaaactgctttttgatatgtggtttcatctcacagtgttgaacctttctttttactcagcaatttggggacagtcgttggttagaatgtatgaggaaatatttgggagctttttgaggcctatggtgaaaaaccgaatatccccagataaagcctagaaaaaagctgtctttgaaactgctttgtgatgtgtgtattcatcttacagagttaaatttttattttgatacagcaggtttgaaactctctttaggtagaatctgtgaagggacatttgggaacactttgagccctatggtgaaaaataaaatagccccagataaacacgagaaagaagctaactgtgaaactgctttgtaatgtatggattcacctcactgagttgaacatttcttttgattcagcaggttggaaaccctctttttggagattctgcaaagggacatgtgtgagcccttagaagcctattgtgagaaacagaatatccacagataaaaactagaaataaggtatcagtgaaactgctttgtgatatgtggattcatctcacagaggtaagcctttcttttgatacagcaggtttgaaagacttttttggaagaatctgcaaagggacatatggaagcccatagaggtttctgttcaaaaactgaatatcttcacataaatactaggaagaagctataagaagctattggtgaaacctctttgtgatgtgaagattcatctcacagagttaaacatttcttttgattcagcagcttggaaacactcgttctgtagagcctgcagagagacatttgggggctcatagagacctaaagtgaaaagcccaatatccccagataaagactcgaaggaatctatccgtgaaactgctttgtgatgtgtggattcatctccctgagttaaacctatcttttgattaagcatgttggaatcactcttttggtagaatctgcaaagtaacatttgggcaccctttaaagcctacagtgaaaaaccgaatatctccaaataaaaacaagaaagaagctatctgtgaaagggctttgtgatgtgttgattcatctcacagatttcgaccttacttttcattcagcatttttagaacactctttatgtagaatcaacgatgggacatttggcagcggttttttggcctctggtgaataactgaatattccaagataaaaattagaaagactctgtctgtaaaacggctttttgatgtgtggattcatctcacagagttaaacattatttttgattcagtagcttgtaaacactcattaggtagaatcagtggaaagacatttgggagcccatagaggcctaaggtgaaaaactgaatatccccagataaaaactagaaagaagctatctctgtaactgttttgttatgtgtggattcatgtcacagagctaaacctttcttttgattcagaaggttgcaaatacttatgtttcataatctgcatagtgacatttgggagcccattaaagcctacagtgaaaaatcgaatatccccagataaaaaccagaaagaagctatctttgaaactgctttgtgatgtgtggtttcatctcatagtcttaaaccttacttttgactcagtattttggaaacactcttttgctagaatccaggaatggagatttgtgagcctactctagtttatggtaaaaataaaaacaaacaaatatttcaagataaaaactagaaagcagctatcagtgaatctgttttgtgatgcgtagattcatctcacagagttaaaccttccttttgatttagcagtttggaaacacctttttgtagaatctgtgaagggacatttgagagaactttgacacctataaggaaaaacaaaaatcctcagataaaaactagaaggaagctctttgtgaaactgttttggatgtgtttattcacctaacagagttaaacctttctgtcaatatagcaggtttgaaacattttttagatagaatctgaagagcccatagaggcctatggtgaaaaacagaatatccccagatagaaagtagaaaaaagctaaatatgtaactgctttgtgatgtgtgtattcatctcacagagttaaatctttcttttgacacagcatatatgaaacactctttagatagtatctgcaaagggacatttaagagcccttagaggcctatggtgaaaaactcaaaaactctagataaaaactagaaagaagctatctgtttaacttatttgtaatgtctggatttatctcacagagataagcatttatattgattcagcaagttggaatctctcttttggtagaatctgccaagggacatttggaatcccttaaaagtctattgtgaaaaactgaatataccttgataaaaactagaaagaagctatctgcaaaactgcatgataaagtgtggattcatgtcagagagttcaacatttattttgattcatcacgttggaaacactcgttttgtacactctgttaagagacattttggagcccattttgtcctatggtaaacaacacaatatttccaaataaacaccagaagaaagctatctgtgaaagtggtttgtgatgtgtgattcatctcacagatttaaacttttttttattcaataggttggagacactcattttgtagaattggcaatgggatattgtggagcccagtgaggcctatggtgaacaatccaatatttccagatgaacaccagaaagaagctacccgtgaaactgctttgtgatgtgtgattcatctcacagatttaaactttttttttgattcagtaggatggagacactcatttttttgaatcaactatgggatattttggagcccattggggcctatggtgaacaatccaatatttccagatgaaaacaagaaggaagctatccatgaaactgctttgtgatgtgcaattcatctcacagatttaaactatttctttattcagtaggaaggagatattcttttttttgaattgactatgggatattttggagcccattgaggactatggttgaaaagaaaatatcccaagctaaaaactaaaaaggagctatctgtgaacctgctttgatgtttggatttatctcacagagttaaacctttcttttgattcagcaggttttaaacactcttttggtagcatctgcatagagacgtatcacagcccatcgaggcctatggtgaacaaatggatatcaccagataaaaactagaaggaagctatttctgagaccgcattgtgatctgtgcatttatctcacagagttaaatctttctattgattcagcaggatgcaaacactctttttgtagaatctgcaaagggacagttgggagcccatttaagcctatggtgaaaaattgaatatccccagataaaaactagaaataaccaatcagcgaaactgcttttttgttgtgtggatgtatctcacagacttaaaaatttcctttgattttgcaggtttgaaacataccttttgcagaatctgtggagggacattttggaaccccttaaggcctgtcgtgaaaaagaaaatattccgagatgaaaactagaaagaagctatctgtgaagtgctctgtgacgtatggagtcattgcacagagctatacccttctattgatacagcaagatggaaacaatctttacatagaatctgcgaaggaacatttataagcccttagaggactatggtgaaaaacagaatatccccacataaaaactatcaagaagctatctgtgaaactgcattgttaagtgtggaatcagctcaaaggcttaaaactttcttttgaatcagcaagttgcagacactcttttgctggaatctgcgaagggacatttgtaagcccattgtagcacactgtgagaaatggaatattcaaagataaaaactagaaagaagcttttagtgaaactacttcatgatgtgtggattctactcacagagttaaactttttattgtttcagcaggttggaaacactcttttggtaaaattgggaaaggcacatgttggagcccattgagacctattgtgaaaaactgaatattcccagatacaaactacaaagaagctatctgtgaaactgctctatgatgtgtggattcatctcacagagttaaacctttcttttgattcagcaggttggaaacacttttttggcagaatctgcaaagggagatttggatctttttgcagcctatggtgaaaaacagaatacccagagtttaaaaactgcaaagtagctctctgtgaaactgctttgtgatgtgtggattcatcacacagagataagcctttcctttgatttggcaggttggaaacccttgttttctaacctgataatgaatattttgaagcttgttgaggcctatggtgaaaaaaaaaatccctagttaaaaactagaaggaagctaccagtgaaactgctttgtgatgtgtggattcaccactgagagttaaatctttcttttcatccagaaaattggaaatattctttagatagaatatgcacagggacatttgggagaccatagaggctaatggtgaaaaacagaatatcctcagataaaaactagaaagaaggtgtctgtgaaactgttttgtgatgtgtggattcacctcacagaattaaacgttgttttgattcaacaggtgtgagaccctcttttcataggatctgtgaagggacatttggaagcccattgaggtttatggtgaaaaaccgaatatttctagataaatactagaaataacctagctgtgaaactgccttgtgatgcgtgcattcatttcacagatttaaacaatccttttgattctgtaaattggaaacactcttatggtagaatctttcaagggacatttcggagcccttagatgcctatgtaaaaaaccaagtatacccagataaaaactagaaagaagctatctgtgaaacagctttgtaatgtttggattcaaatcacaagcttaaacctttcttttgattcagcgggttacaaacaccatttaatagaatctgcgagggtagatttgggaaccatttcaggaatgtagtgaaaaactgaatacacccagatacaaaccagaaagaaactatttgtgaaactgctttttttttttgtggattctcctcacagagataaacatttcctttgattcagcaggttggaaacactcattttgtagaatctgaatggggcattttgaagccctttgaggactatggtaaaaaaaaaataaaaacacaatatcctcagataaaaactatgaagaagctatctgtgagcttttttgtgatgtgtggattcatctcacagaggtaaaagtttcttttgatacagcatgttggaaacactgttttcatagaatcttcaaagtgaaatttaggagctttttgtggagtatggagaaaaactgaatgttcacacatgaaaactggaaagaagctatctgtgaaacagctttgtgatctgtggaatcatctcacagagctaaacctgtctattgaatcagcaagttgcatacactctttttgtagaatctgcgaataaacttttgggagaccattgagcctatggtgaaaaactgaatatccccagaaagcactagaaaaaagtgatctgtgaaactgctttgagttgtgtggattcctttcacagtgtcatacctttcttttgatttaacaagttggaaatactatgttgttagaatctgtgaagggacatttgggagcccatggggtcctatggtgaaaaaccaaatatccccagataaaaaccagaaagaagctatctttgaaactgctttgtgatgtgtggatcatctgaaagacttaaacctttcttttgactcagcatgttggaaatactctttggctacaatctgcaaaaggagatttgtgagcccactgtactctatggcaaaatatgtgtgtgtgtgtgtgtgtgtgtgtgtgtgtgtgtgtgtgtatcagtgagtctgctttgtgatgcatggattcctctcccaaatttaaacatttgtttagattcagaaagttggaaacacctttttgtagaacctgcaaacggaaatttgtgagaccattgaggcctataatgcaaaacagaaaatctccagataaaaactagaagagagctctttgtgaaaccttttggggtgtgtttattcatttgacagaattaaacctttctgtcaatatagcatgtttgaaacattttttggatagaatctgtgaaggttacatttaagagcccatagagacctatggtggaaaacagaatatccctggaaaaaaagtagaaaaaagctaaatatataactgctttgagatgtatgcattcatcaaacagagttaaacctttcttttgacacagtaggtgtgaaacactttatagttagatctgtgaagggacatttaagagcccacagatgcctatggtgaaaaactaaataactccagatgaaaactagaaagaaactatctgtttaacttatttgtattgtttggatttacctcaccaagataaatatttctattgattcagcaagttggaatcactcttttagtagaatctgccaagggacatttgggatcccttagaggcctaatgtgaaaaacttaatataacttgataaaaactagaaagaatcaatctgtaaaactttattgtaaagtgtcatttcatgtcacatagttaaacagttattttgattcttcaggttggaaacactcgttttgtacattctgtgaagagacattttggagcccattgagtcctaaggtgaaaaacccaatatttccagataaaaaccagaaggaagctactatgaaactgctttgtgttctgtgcattcttctcacagagttaaatttttcttttgattcagcagtatggacacactctttttgtagaatctacaaactgatacaggggagcacattgaggcctgtagtgaaaaaggacatatcttcagagaaaaactagaaagaatctttctgagaaactgttttgtgatgtgtgcattcatctcacagagttaagcctttcctttgattgagcagtttgaaagcattatttcagtagaatctgtgaagggatatttgggagcacgttgggggctatggtgaaaaaggaaatatactcagagcaaaacgagaaataagttttctgagaaactactttgtcatgagtactttcatctcacagagttaacactttcttttgattgataagtttggtaacagtgtgttttgtagaatctgagaagggatatttgggagggctttgaggcctatggtaaaaatgaaatatcttcagataaaaactatgaagaagctttctgggtaactgctttgtgatttgtgcattcatctcacagagttaaacatatcttctgattgagcagttttgaaacactgtttttgtagaatctgtgaaaggatatttaggagccctttgatggtgaaaaaggaaatatcttcagaaaaaaacaaaaagaagctttctgagaaactgctttgtgatgagtgcatttatctcacagaatttaacctttctcttggttgagcagtttggaaacactgtttttatagaatctgcaaagagatatttgggagctcactgaaacctatggtgaaaaaggaaatatctacagaaaaatactagaaataagctttctcagaaataactttggaatgtgtgcattcttctcacagaactaaagctttctttttacaaagccatttggaaacactgtttttgaagaatctgcaaaaggatatttgggagcgctttgaggcctatggtgaaaaaggaaatatctccagataaaaacgagaaagaagctttctcagaaactgctttctggtgtgtgcattcttctcacagacttaaaattttattttgattgagctgtgtggacacacactttttgtagaatctatgaagggatacgtgggagtgctttgagccctaacatgaaaaaggaaatatattcagagaaaaactagaaagaagctttctgagaaatggctttgtgatatgtgcattcatctcatggagttaaacgtttcttttgaatgagaggtttggaaataatgttttggtagaatctgtgaagggatatttgggagcgctttgaggactatggtgaataaggaaatatcttcagaaaaaaaaagaagctttctgagaaactgctttgtggtgagtgcattcatctcacagaattaaacctttctattgatcaagcagtttggaaacaatgtttttatagaatctgcaaagggatatttgggagtgcattgaagtctatggtgaaaaaggaaatatccccagaaaaatactagaaagaagctttctctgaaatccttttgtgatgtgtacattcttctcacagaattaaacctttctttcgattgagcagtttggaaacactgttcttgtagaaagttcaaagagatatttgggagtgcattgaggcctatggtgaaaaaggaaatatcttcagattaaaaactggaaagaagacttctagaaattgctttgtggagggtgcattgttcttacagagttaaaccttcattttgattgagcagttgggacacagagcttttgtagaaactatgaagggatatttgggaatgcactgagccctagggtgaagaaggaaatatattcagagtaaaactaggaagaagctttctgagaaactgctttgtgatatgtgcattcatctcatggagttaaacatttcttttgattgagcagtttggaaacactgttgtggtagaatctgtgaagggatatttgagagcaacttgtggtgtatggtgaaaagggaaataatttcagataaaaactagaaagaagctttctgagaaactgctttgtgatgggtgcattcatttcagacttaaccttttcttttgattcagaagtttggctacactgtttgtagaatctgaaaagggatactggggagtgctttgaggccaatggtgaaaagcaaaataactaaaagaagctttctgagaaactgctttgtgatgagtccattcatatcacagagttaaacatttcttttgattgaatagtttggcagcattatttttgtagaatctgagaagggatatttggcagccaattgaggcctatggtgaaaaaggaaatatattcagataaatatgagaaggaagctttctcagataccactttgagatgtgtgcattcttatgagacagttaaacctttcctttgattgagcaatttggaaccactgtttttatagaatctgtgaagggatatttgggagtgcttttaggcctgtggtgaaaacagaaatatcttcagataaaaacaagaaagaggctttctcagaaactgttctgtgatgtgtgcattcttcccacagagttaaacttttcttttgattgagagtttggaacactgtttttgtagaatctacgtagtgatatatggaagcacattgaggcctactctgaaaaaggaaatatcttcagagaaaaactagaaacaggctttctgagaaactactttgtgatgtgtgcattcatctcacagagttcaacctttcttttgattgagcagtttggaaacactgtattggtagaatctgcaaaggtatatttgggatagctctaaggcctactagggtgaaaaagaaaatatcttcagataaaaaatacaaagagtctttttgggaaagtgctttgtgatgtgtgcattcatctcactgacttaacattttcttttcattgagcagtttggaaacactgtttttgtagaatctgtgaattgatatttgggagagcatagtgacctgtgatgaaaaaggaaatatcttcaaacaaaaactagaaagaagctttctgaggagctgctttgtaatgagtgcactcatctctcagagttaaacttttcttttgattgagcagctttggaacagtgtctttgtagaatctgagaagggatatttgggagcgctttgaggtgtaaggtgaaaaatgaaatatcttcagctaaaactagaaagagacttttgggagtctgctttgtgatgtgtacattcatctcacagatttaaacttttctcttcattgagcagtttggccatactgttttgtacaatctgagaaggtgtatttgagagccccttgagacctttggtgaaaaaagaaataccttcagataaaaactagaaagaatctttccaggaaactgctttgtgatgtgggcattcgtctcacagatataaaacttttttttgattgagcagttttgaaacactgtttttctagaatctgggaagggatatttgggagtgcattgtggccaatgggaaaaacagaagaacttcagataaaaactacagaaaactttctgagtaactgcttagtgatgagtgcattcaacccacacagttaaacttttcttttaatacagcaattaagaaacagtgtttttctagaatctgagaagcgatatttgggagtgctttgaggcctatggtgaaaaaggaaataccttcagataaaaactagaaagaagctttctgagacactgctttatgatgagggcattcaactcacacagttaaaccttttttttttttttttttgattgaacagtttgggaacagcgtttttgtagaatctgagaagggatattagggagcactttgaggccaacggtgaaaaataaaatatctccagataaaaactagaaagaagctttctgggaaactgctttgtgatgtgtgcattcatctcccaggtttaaacatttcttttgattaagcagattggaaacactgtcttggtagtatctgcgatgggatatttgggatcactctaaggcctatcttgaaaaaagaaatatattcagataaaaaatagaaagaagctttctgagaaactgctttattatgagtgcattcatcttacacagttaaacctttctttagattcagcattttgggaacagtgtttttgtagaatctgagaagggatatatgggagcgctttgaggtgtttggtgaaaaacgatatatcttcagataaaactggaagaaagctcttaggaatgtgatttgtgatatctgcattcatcttacagagttatgcccttcttttcagtgagcagtttggaaacactgttgttggagaatctgccaagggatatatgggagcccattgagggctacagtgaaaaaggaaatatcttctgataaaaagtagaaagaagctttctaagaaacagctttgtgatgtgtgcattcatctcacagagttaaacgtttcctttgattgagcagtttggaaacactcttttggtagaatctgagaagggatatttgggagcgccttgaggcctatggtaaaaaaggaacatcatcagagaaaaagtagagagaagctttctgagaaactcctttgtgatgtgtgcatacttctcacagagaagagtgttttgaaacactctttttgtagaatttgagacgggatacttgggagtgcattgaggcctacgttgaaaaagtaaatatcttcacataaaaattagtaagaagctttctgagaaaccacttcgttatgtgttcattcttcttccagagttacaattttcttttgattgagcagtgtggaaatgctgtatttgtagaatctacaaagggatatacaggacggcatttagaactatgtgaaaaagtaagtatcttcagaggaaaactagaatgaagccttctgagaaactgctttgtgctgtgtgcaatcatctcacagaattaaacctttcttagaatcgaacagtttgacaagactgtctttgtataatctgcaaagagatatttgggagcacatttaggcctatggtgaaaaaggaaatatcttcagataaaaactagaaagaagattctgagaaaccactttgtgatgtgtggattcttctcatagagttaaactttccttttgatagagcagtttggaaacagattttgtggaatgtaccaatgatatatgggagtgcattgaggtctatggtgaaaaaggtaatattgtcagagaaaaactagaaggaagggttctcagaaactgctttgtgatgtgtgcattcagttcacagagttaaacctttcttttgtttaagccattttgaaacactctttttgtagaatctgtgaagggatatttgggagcacattgaggcttctggtgaaaaaggtaatatctaaggataaaaagaagaaagatgcttcctgatgaactgctttgtgataagtgcattcatctcacagaggtaaacctttcttttgattgagcagttggcaacactgcttttgtggaatctgagaagggatactgggagcactttgaggcctatggtgaaaagcaaaatatgtacagataataactagtaagaagatctttcagaaactgctttgtgatgtgtgtattcatctcagagtttgatctttcttttgattgagcagatctgaaactctttttgtagaatctgcaatgtgatatttgggagcacattgaggcttaaggtgaaaaaggaaacatctttacataaatactggaaagaagctttctcagaaattgctccatgatatgtgcattcttatcacagagttaaacctttcttttgattaagcaatttgcaaacactgtttttgtagaatctacaaagggatatttgggagcactttgaggcctatgatgaaaacagaaatatcttcagataaaaataagaaggaagctttcccaggaactgctttgtgatgtgtgaattcttctcagagagttaaacatttattttgatacagagtgtggaaacactgttttagaagaacctacacagggatatataggagcacattgaggcctatggtaaacgaggaaatatcttctgagaaaaactagaaagaagctgtctgagaaactgctttgggacatgcgcattcatctaacggagttaaaccttctttttgattgagcagtttgtaaacactgttatggtacaatccccaaagggatatttgggatcactttaaagcctagggtgaaaaaggaaacatattcagaaagaatatttcctagaaagaagctttctgggtaacagctttgtgatgtgtgcattcatctcacagaattaaatctgtgttttgattgagcaggttagaaacactgtttttgtagaatctgcaaagggatatttgggagcatattgtggcctatggtgaaaaaggaaatgtcttcagataaaaacttgaaagaaactttctgagaaacggctctgtgatgagtgcattcatctcacacagttaaacctttcttttgattgagcagtttgagaacagtgtttttgtagaatatgagaagggatatttgggagtgctttgagtcatagtgtgaaaaactatatatcttcatgtaaaaactagcaagaagatttctcagaaaccgcatagttttgtgttcattcttctcatagagttaaacctttgttttgatttagaagtgtggaaacactatttttgtagaatctacgaaaggatgtatgggaatgcattgagatctatggtgaaaaagtaagtgtcttcagagaaaaactagaatgaagctttctgagaaagtgctttgtggtatgagcattcatctcacagagttaaaccttttttctgactgaaccatttgaaaacactcttttggtttcaatctgtgaagagatatttaggagcacattgaggcctatggtgaagaaagaaatatcctcagataaaaactagaaagaagctttctgagaaactgctttgtaatgattgcattcatctcactgagttaaacttttcttttgattcagcagtttggtcttactattttgtagaatctgagaaggcatatttgagagtgatttgagtccttgggtgaaaaaggaaatatcttctgataagaattaggaagaagctttctgggacactgctttgtgatgtttgcactcatctcacgtagttaaaactttcttttgattgagcagtttggcaacactgtttttgtagaatctgtgaagtgacatttggaagtgcttcgaggcctaagctgaaaagggacatacctttagaaaaaactagaaagaagctttttgagaaactgctttgtgatgtgtgcattcatctcacagagttaaacctttctttttattgagcagtttggaaacaatttggtacaatctgagaaaggatatttgggagtgcattgaggtctatggtgaaaaaagaaatatcttcagagaaaaaccagaaagcagctttctgagaaactgctttgtgatgagtgcattcatctcagagggttaaacctttgttttgatagagcagtttggcaaaactgtttttgtagaatcagagaagggatttttgagagtgctttgaggactatggtgaaaaaggaaataccttcagataaaaactgggaagaagcattctgggaaactgctttgtgatgtgtgcattcacctcacagagttaaaaactttcttttgatttagcagattgaatatactgttcttgcagaatctacaaagggatatttgggagtgacttgaggcctatggtggaaaaggaaatatcttcagaaaaagactaaaaacaagctttctgagaaactgctttgtgagagtacattcatctcacggaattaaacctttttttaattgaaagtttggaaatactgttttggtagaaactgcaagctatatttgggaacgatttaagtcctagggagaagaaggaaatatcttcagaaaaaactagaaagaagctttctgggaaacctccttagtgatgtgtgcattcacctcacagtattaaatttttcttttgattgagcagtttggaaaccttgtttcagtaggatgtgcaaagagatatttggaagggcattgaggcatatggtgaaaaaggaagtatcttctgagaaaaactaaaaagaaactttctgagaaacttctttctgatgagtgcatttatctcacaaagttaaacctttcttttgattgagcagttgaaaacactgttttggtggaatctgcaaatgcatatttgagagtacttttaggcctagagtgaaaatagaaataacttcagatgaaaactacaaagaaactttctgggaaactgcactgtgatctgtgctatcaacacacaattaaagctttcttttaattgagcagtttggaaacaatgtactcctagatctgtgaagggatatttgggagcgctttgagtcatatggtgaaaagggaaatattttcagaaaaaaattggaaagaagctttctaagacactgcttagtgacgagtgcatgcatcacaaagagataaacatttattttgatcgagcagttggaacactgtttttgtggaatctacaaagagatatttggtgtgaattgaggcctatggtgaaaaaggaaacatcttcagataaatactagaaagaagcttctcagaaactttttttgatgagtccatttttctcacaaagttaaacatttctttggattgaggagtttgtaaacactgttgtggtagaatgagtgaaggaatatttgagagtgcattgaggcttatgataaaaaagaaattatcttcagagaaaaactagaaagaatttttctgagtaactgctttgtgatgagagcattcatctcaaagaattaaaccattctattgattgagcaatttttaaaaacttttggtaggatctgcaaagtgatatttcagaacactttgaggcttatggtgaataggaaatatcttcagataaaagctagaaagaagcttttggggaattgctttgtgatgatttccttcatctcacagggttaaacctttcttttgattgagcagtttggcaacagtgtttttgcagtatctgagaagagacatttggtagagctttgacccctatggtgaaaaatgaaatatcttcagataaaaactagaaagaagctttctgggaaactgctttgtgatatgtgcattcatctcccagagttaaccctttctgttgatagagcagtttggaaacactgtttatgtagaaactgcaagggaatatttgggagcacattgaggcttctggtgaaacaggaaaaactttcagataaatactagaaagaagatttctgagaaaccgctttgtgatgagtgcattcttctcaaagagttaaagctttcttttgattgaacagttttgaaacactgtttttgtagaatctgcaaagggatattttggagcatatgtaagcctatggtgaaaaaggaaatatcttcagataaaaacaagaaagaagcgttctaagaaaccactttatgatgtttgcactcttctcacagatttaaacctttctttttattgagcagtttggaaacactgttttggtagaatctgtgaaggtatattttggattgctttaattcctggggtgaagaaggaaatatcttcagtttaaaactggaaagaaacttcctgggaaactgctttgtgatgtgtaccatcatttcaaataattaaacttttcttttcattgagctctttggaaacaatgtttgacagaacctgggaagggatatttggagtgcattcaggcatacagtgaaaaaggaaatatattcacctaaaaagttgtaagaagctacctcagaaactgctttgtgatgtttgcactcttctcacagagttaaacctctcttttgattgagcagtttggaaacactctttttgtagaatgtgggaggggaaatttgggattgctttaattcctagggtgaaaaagaaaatatcttcagataaaaactagaaagaagctctctgggaaactgctttgtgatgtgtgcattcatttcatagaattaagcttttcattcaattgagcagtttggaaacaatgtttggtagaatctgcaaagggatatttgggagcacattaaggcctatggtgaaaaaggaaatatcttcacataaaaactagtaacaagctttctcagaaaccactttgttatgcattaattcttctcacagagttaaacctctcttttgattgagaaatctggaaacattgtttttgtacaattcacaaacggatatatgggaatgcattgagacctatggcgaaaaagaaaatatcttcagagaaaaactagaatgaagctttctgagaaactgctttgggatgtgtgcattcatctcgtggagttaaacattttttctgattgaaccatttggaaacactgtttcagtagaatctgtgaagggatatttgggaggtcattgaggtctatggagaaaaaggaaatatcttcagataaaaactagaaagaatatttctgacaaactgctttgtgatgaatacattcatctcacagaggtaacttttcttttgattcagcactttggccatactatgtttgtagaaactgagaaggtatatttgagagtgctttgaggcctatggtgaaaaaggaaatatcttcacataaaaactagtaagaagttttctggaaagaaaaaaacaaacaaccccatcaaaaaatgggcaaaagatatgaacagacacttctcaaaagaagacatttatgcagccaaaaaacacacgaaaaaatgctcatcatcactggccatcagagaaatgcaaatctaaaccacaatgagataccaactcacaccagttagaatggcaatcattaaaaagtcaggaaacaacaggtgctggagaggatgtggagaaataggaacacttttacactgttggtggcactgtaaactagtccaatcattgtggaagtcagtgtggcgattcctcagggatctagaactagaaataccatttgacccagccatcccattactgggtatatacccaaagcattataaatcatgctgctataaagacatatatacacgtatgtttatagcggcactattcacaatagccaagacttggaaccaaccctaatgtcccacaatgatagactggattaagaaaatgtggcacatatacaccatggaatactatgcagccataaaaaatgatgagttcatgtcctttgtaggaacatggatgaaactggaaaccatcattctcagcaaactatcgcaaggacaaaaaaccaaacactgcatgttctcactcataggtgggaattgaacaatgagaacatatggtcacaggaaggggaacatcacacaacggggactgttgtggggtgggggaggggagggggacagcattaggagatatacctaatgctaaatgatgagttaatgggttcagcacaccaacatggcacatgtatacatatgtaacaaacctgcatgttgggcacgtgtaccctaaaaataaagtacaataataataaaattaaaaacaaaagctttctgggaaactgctttgtgatgtttgcattcatatcacagagttaaaactttctgttcattgagcagtttaacaacaccatttctgtagaatctgtgaagggatatttgggagcatgttgaggcttatcatgaaaaagacatatcttcagacaaaactagaaaaaagctttctgagaaactgcttcgtgatatgtgcattcatctcacacagttaaaactttcttttgattaagcagcttggaaacactatttggtacaatctgcgaaaggatattttggagtgcattgaggcccatggtgaaaaaggaaatatcttcagagaaaaactggaaagaagctttctcagaaatagctctgtgatgagtgcattcatctcacacagttaaaactttcttttgattgagcagttttgttaaactgtttttgtagaatctaagaagggatacttgagagcactttgaggcctacagtgaaaaaggaaatatcttaaaaaaaattaaaaataagttgtctgagaaactgccttgtgataagagtattcaactgacatagttaaacctttcttttgattgtgcagtttgggaacagtgcttttgtagaatcagagaagggatatttgggatcgttttgaggccaatggtgaaaaatgaaatatcttcaggtaaatacaagaaagaagctttctcagaaactgctttgtgatgtgtgcattcatctcactgagttaaaactttcttttgattgagcagtttggaaacactgttttggtagaatctgccaaaatatattttcgagcctattgaggcctatggtgaaaagggaaatatcttcagattaaaactagaaagaagcattctcagaaaccagcttgtgatgtgtccattcttctcacagagttaaacctttctttagattgagcagttcggaaacactggtttggtagagtgtgcaaaggatatttgggagcacattgaggtctatggtgtaaagggaattatcttcagagaaaactaggaagaattttttggagaaactactttgtgatgtgtgtattcatctcacagtgttaaacttttcttttgagtgagcagtttgtaaacactgtttttatagaatctgtgaagggatatttgggaacacattgaggccaatggtgaaaaaagtaatatcttcagataaaaactagaaagaagctttctcagaaatggctttgtgatgtgtgcacccttctcacagagttaaacctttcttttaattgaacagtttggaaatattgttttgctagaatctatgaaggcatgtttagagaactatgaggactacagtgaaaaacgagatatcttcaattaaaaactggaaagaagatttgcgaaagactgctttgtgatgtttgcattcacctcacagagttaaacctttcttttgattgagcagtttggaagcgttgttttggtagaatctgtgaagggatatttgggagtgctttggggactatggtgaaaaagaaattatcttcagataaaaacttgaaagaagcttcctgggaaactgctttgtgatgtgtgcattcatctcacagaggtaaacttttcctttgattgagcagtttggaaacactgttttggtagaatctgtgaagggatatttgggatcacattgaggcctatgatgaaaaagtaaatatcatcagaaaaaaaaacgagaaagaagcattctgaaaaactgcattatgatgagtgcattcatctcacagagttaaattattcttttgattgagctgtttggaaacactgtttttttgtaatctgagaggggatatctgggagcactttaagacctagggtgaaaaatgaaataacttcagataaaaaacataaagcaactttgtactaaaaattaaaaactagaaattagcttcctgagaaactgctttgtgatatgtgaattcatctcacagaattaagtcttttttttgttgagcagttttttaaaccctatgtttgtggaatttgcggagggatatttgggagagcatagaggcctatggtgaaaaagcatatatcttcagataaaaactacaaagaggctttctcaaaaactgctttgggttcattgcattcttctcacagtgtgaaacctgtcttttaattgagtagtttgcagaaactcctttgtgatgaatatgtgaagggatatttgggaggcatgaggcctacgttgaaaaaacaaatatcttcagataaaaactagaaagaaattttctgagaaactgctttgtgatgaatgcattcatctcactgggttaaaactttcttttgattgagcagtttggaaacactgtctttgtagaatctacgaagggatatttgggagtgcgctgatgcctttggtgaaaaaggaggtatcttcagataaaaagtagcaagaagccttctgggaaactgctttgtggtgtgtttattctcctaacagagttacacctttcttttgattgagcagtttggaaacactgtttttgtagaatctgtgaagggaaacctagaagcgcattgtggcctatgatgtaaaaggaaatatcttgagataaaaactaaaaagaagcattctgagaaactgctttgtgatgaacgcattcatctcacagagtcaatcctatctttggattgagcagttttgcaacactgttttttaagaatcttagaagagatatttgagagtgatttgaggactatggtgaaaaggaaataccttcagataaaaactataaagaaactttctgggaaactgctttgtgatctgtgcaatcatcttctcacagagttaaaaattgcttttgattgagcagtttggaaacaatgttcttgtaggatctgtgaagggatatttagcagtgcttcaaggcctatggtgaaaaaggaagtatcttcagataaaaactagaaagaagctttctgagaaactattttgtgttgagtgcattcatctcacagagttaaagctttattttgattaagcagtttggaaaaactgttttggtagaacttgccaaaggatattttggagcactttgaagcttatggtgaaaaaggaaatatcttcacataaaatctagaaagaagctttctgataaattgctttttgatgattgcattcatcttcttttgatggagatggattcatccatcttctttcgatggagcagttttgcaacagtgtttttgtagaatctcagcagggatatttgggattgcattaaggactaaaatgaaaaacgaattatcttcagataaaaactagaaagaatccttctgggaaactgctttgtgatgtttgcattcatctcagagagttaaacatgtcttttcattgagcagttttgaaacactgtttatgtagaatctgcaaagggatatttgggagcacattgaggctttgggtaaaaaagaaaatatcttcagataaataatataaagaagctttctcagaatctggtttgtgatgtgtgcattcatcacacagagttaaatctttcttttgactgagcagttaaaacgctttttgtataatcggtgaagggatatttgggagcacattgaggactatggtaaaaaaggaaatatcttcagataaaaactagaaagaatcttactcagataatgctttgtgatgtgtgcactcttctaacagagttaaacctttcttttgattgagtagtttggaaacactgttttcgtagaatgtgtgaaaggatatttgggagtgctttgaggcctatggtgaaaaaggaaatatcttcagataaaaactagaaagaagctttctaagaaactgctttgtgatgtttgcattcatctcacagttaaagctttcttttgattgagcagtttggaaactgttttgctagaatatgtgaagggatatttgggaaaatgttgaggtctatggtgaaaaaacaaatatcttcagagaaaaactagaaagaagcttttggaaaaaccgttttgtgattagtgctttcatctcacagaggtaaaccttttttttgtttgagcagtttggagacactgtttttgtggaatttgtgaggggacattaaggagcacattgaggccgatggtaaaaaagcaaatatcttcagataaaaactagaaggaagctttctcagaaactgctttgtgttgtgtgcattcttctcacagagttaaacctttcttttgattgagcagtatggcagcagtgtttttggagaatctcagagggatatttcagagggctgaggactagactgagaaatgaaatatcttcagataaaaactagaaagaagctttcttagaaacagctttgtgatgagtgcattcatctcaaagagttaaacttttcttttgattgagcagtttggcaatggtgtttttgtagaatctgcgaggggatatttgggtgtgcatggaggcctatggtgaataaggaaataacttcagataaaaacttgaaagaaactttcttagaaatagctttgtgttgtgtgtattcttatcatagagccaaacctttcttttgatagagcagtttggaaacactgtttttgtagaatctgcaaaggcatatatgggagccccttaaggtttattgggaaaaaggaaataacttcagataaaattacaaagaagctttctcagaaacagctttgtgttttgtgcattcatatcacagaggtaaacctctcttttgactgagcagtttggcaacactgtttttgtggaatctgcgaagggatatttggtagcacatggaggcctagggtgaaaaagtaagtaacttcagagaaaattagaaagaagcttactctgaaaccgttctgtaatctgttctttcttcttacagagttaaacctttctattgattgagcagtttgaaaacactgttttggtagaatcaatgaagggatatttgggagcgcattgaggcctatggtgaaaaaggaaatatcttcagataagaactagaaagaagcttactcagaaactactttggtatttgtgcattcttctagcagagttgaaactgtcttttgactgagcagtgtgcaaacactgtttttgcagaatctacaaagggatataagggagcacattcaggcctatggtgaaaaagaaaatatcttcagggaaaaactagaaagaagctttctgagaaactgctttgtgatgtgtgcattcatctcacagagttaaacctttcttttaaacactgtattgatagaatctgccaagatttttttgggaatgatttcaagcctattgtgaaaaaggaaatgtcttcagataaaaactagaaagaagcttcctgagaaactgctttgtgatgagtacatttatctcacaaatataaaccattcttatgattgagcagattggcaacagtgtttttgtagaatctgattagggatatttgggatcactttgaggactacagtgaaaaatgaaatatcttcagaaaaaaactagaaagaagctatctggaaaactgctttgtgatgaaggtatttaactcacatagttaaatatttcttttgattgagcagtttgggaacagcgtttttgtagaatcagagaagggatatttgggagtgttttcatgctgatgatgaaaaaagaaatatcttcagatagaaactaaaaagaagctatcttggaaactgatttgtgatgagggtattcaactcacatagttaaacctttctgttgattgagtagtttgggaacagtgtttttgtagaatcagagaagggatgtttgggagcattttgaggccgatggtgaaaaatgaaatgtcttcagataaatactagaaagaagctttctcagaaactgctttgtgatgtgtgcattcatctcacagagttaaacttttcttttgattgaatagtttggaaacactgttttcagagaatctaccaaaggatatttgggggcacattgagacctatgctaacaaaggaaatatcttcagattaaaactagaaagaagctttctcagaaaccggtttgtgatgtgttcattcttctcagagagttaaacctgtcttttcattgggctgtttggaaatactgtttttgtagaatctgagaaatgatatttgagagtgttttgaggcctatggtgaaaaaggagatatcatcagatataaaactctaaagaaactttctgggaaagtgttttgtgatctgtgctgtcatctcacagagttaaacctttgttttgattgggaagtgtggaaacactgttcttgtagaatctgtgaagggatatttgggagcgctatgtaggcctatgttgaaaaacgaaatatcttcagaaaaaaactggaaacaagctttctgagacactgcttggttgtgagtgcatgcatctaacaaagttaaacttttcttttgcttgagaagtttggaaatactgtttttgtagaatctgtgaaggaatatttgggagcaaattgagggctatgttgaaacatgaaatatcttcagataaatactagaaagaagatttcttacaaaccattttttgatgtgaccatttttctcacagagttaaacctttctttggattgagcagtttagaaacactgttttggtagaatgtgtgaagggtatttgggagctccttgaggcctatgatgaaaaaggaattatctccagagaaaactagaaagaagctttttgagaaactactttgtgatgtgtgcattcgtcttacagagttaaacttttcttttgattgagctgtttggaaacactgttttggaagtatctggatagggatatttgggagcacattgaggcctagggtgaaaaaggaaatatcttcagattaaaactagaaagaaactttctgagaaagtgttctgtgatgagtgcattcatctcacagagtgaaaactttcttttgattgagcagtttggcaacagtgtttttgtagaatctgagaagggatatttgggagcaatttatggtctatagtgaaaaaggaaatatcttcagataaaactagaaagaaactttctgggaaactgctttgtgatgtgtgcattcatctaacagagttaaatctttattttgattgagtagtttggaaacattgattttgtagaatagtcaaagggaaatttcagagctttttgaggcctatggtgaaaaagaaaacatcttcaggtggaaacgagaaagaagtgttctgagaaactgcttttcgatgagttcatttatctcagagatttcaacatttcttttgattgagctgtttgaaaaccaagtttttctagaacctgagaagggaaatttgggagcactttgtggcctatgttaaaaaaggaaatatcttcagataaaaactagaaaaacttttataggtaactaccttctgatgtgtgcattcttctcacagagttaaacatttcttttcattcagcagtttggaaacactctttttgtagaatttgtgaagggccattttggagtgcatgaacgtctatggtgaaaaagggaatatcttcagagaagaacaagaaagaagctttcagagaaagtaatttatgatttgcacattcatctcacagagttaaacctttcttttgattgaggagttaggaaacctagtttttgtagaatctgagaaggcatatttgggagtgcattgaggcctatgttgaaaaaggaagtatcttcagataagaactagaaagaagctttctcagaaactgctttgtattgtctgcaatcttctcacagagttaaatcattttttttgattgagcagtttggaaaccctgtttttgtagaatctgccaaggcatataagggagcgccttaaggcttactgtgaaaaaggaaatatcttcagggaaaaactagaaagaagctttcttagaaattgctttgtgatgcatgcatttgtctcacagagttaaacctttcatttgattgaggctttttgaaacactgttttggaagaatctgtgaattgatatttcggagatctttgagccctttgatgaaaaaggaaatatcttcagaggaaaactgcaaagaagatttctgagaatctgctttgtgacatgtgccttcatctcacagttaaaactttcttttgattgagcagtttggaaacactgttttggtagaatttgcaaaggtatatttggaagtgcattgtggcctatggtgaaaaggaaatatcttcaggaaaaaagcagaaataaactttctgagaaattgctttatgatgagtgcattcatctcacagagttaaaccttacttttcattgagtagtttgggaacaaagtttttgtagaatctgagaaggcatatgtggcagttccttaaggcctattctgagaaaggaaatatcctcagggaaaaactagaaagaactttctgggaaactgctttgtgatgtgcacattcatctgacagagttaaaactttcttttgattgaacagtttggaatcactgttttgggggaatctgtgatgggatatttcggagctttttgaggcctatggtgaaaaaggaattatcttcagataaaaactagaaagaagctttctgagaaactggtttttgatgagtgcattcacctcactgacttaaacctttcttctgattgagcagtttggaaacactgtttttgtagtatctgcaaaaggatatttgggattgccttgatgactgtggtgaaaaatgaaatatcttcagataaatagtagacagaatctctcagaaactgctttgtgatgtgcacatacttctcacagagttaaaacattctttgattgggtggtttggaagcactgtttttgtggaatctatgaagggataatttggagcacatggaggcctatggtgaaaaaaaaatcttcagataaataatacaaagaagctttcacagaaacagccttgtgttgtgtgcattcttctcacagagttaaacctttcttttgatttagcagatcggaaacactgttttgtagaatctgcaaagacatatatgggagtgcattaaggcctattgtgaaaaagaagatatcttcagggaaaaactataaagaagctttctgagaaactgctttgtgatgtgtgcattcatctccaagaggtaaacctttcttttctttgacaagtttggaaacactgttgtggtactatctgtgaagggtatttcagagtgcattgaggagcttggagaaaaaggatatatcaacagagaaaaactggaaagaagctttccgagaaactgctttgtgatgtgtgcatttatctcatggtgtcaaacttttcttttgattgaggagtttggaaacactgttttggtagaatctgtgaagggatatttgggagctcattgaggcctttgtgaaaaaggaaatatcttcagagataagaaagaagcattcagagaaactgctttgtgatgtgtgcattcatctcacagagtaaaaccttccattgattgagcagtttggaaacactgttttgttagaatctgtgaaggaatatttggaagtgcattgtggcctattttgaaaaaggaagtatcttcagataaaaactagaaagaagcgttctgagaaactgctttgtgatgagtgaattcatctcacagtgttaaacttttcttttcattgaggagttttgggaacagtatttctgtagaatctgagatggggtattttcaagtccattgtagcctatggtgaaaaaggaaatatcttcagataaaaaatagaaagacggtttctgagaaactgctctgtgatgtgtgcattcttcttaaacacttaaacatttctttagtttgagcagtctggaaacactgtttttgtagaatctacgaaggaatatataggtgagctttgaggtccatggtgaaaaaggaaatatcttcagaaaaaaactagaaaacaggtttctgagaaatagctttgtgatgagtacattgagctcacagctgagtagtttgggaaccgcgtttttgtagaatcagagaagggatatttgggagtgttttcatgctgatggtgaaaaaagaaatatcttcagatagaaactaaaaagaagctatcttggaaactgatttgtgatgagggtattcaactcacatagttaaacctttcttttgatttagcagtttggtcactgtttttgtagaatctctgaagggatatttgggagcactttgaggctgtggtgaaaaacaaaatatctgcagataaaaactagaaagaagctttctgggaaactgctttgcaatgtgtgcattcatcttacagagttaaactttctttttctgagcattgtagaaacactgttttggaagaatctgcaaaaaaatattcaggagcacattgaggccgatggtgaaaaaggaaatatcttcagataaaaaagagaaacaagctttctcagaaaattctttgtgatgtgtgcaattgcatcagagagttaagcctttctttctgagcagtctggaaacactgctttggtagaatctgtgaagggatatttgggagcacattgaggcctatggtgaaaaaggaaatatctttatataaaaactagaaataagctttcttagaatcagctttgtgatgggtgtattcaccatatacagttaaaacttccttttgattgagcagtgtagaaacactgttttggtagaacctgtgaagggacatttggcagtgcattgaggcttatggtgaaaaaggaaacatcttcagataaaaattagaaaagagctttctgagaaactgctttgtgatgagtgcattgatctcactgagttaaaagtttcttttcgttgagctgtttggccacaatgtttttgtagaatctgagaagggatatttggaagcactttgaggccaacggtgaaaaagaaaacaattttcagattcatagaagaaggaagctttgtgggaaactgctttgtgattcgggcattcatctcactgatttaaaattttcttttgattgagctgtttggaaacactgtttttgtagaatctgtgaaggggtatttgggagaaatttgagcccaatggtgacaaaggaaatatcttcaggaaaatactgataaaaatatttaccagaaactgctttgggatgtgtgcattcttctcagagagtttaaccttgcttttgattgagcaatttggaatctctgtttttgtagaatatgggaagggatatttgggagcactttaaaaactatggtgaaaaatgatatatcttcagagaaaaactagaaagaagctttatggaaactgctctgagatgagtacattcttctggcagagttagaacattattttgattcagcagtttgcaaacacagtttctatgaaatctaccaagggatatttgggcgtgtattgaggcttacagtgaaaaaggagatatcttcaggtaaatatgagaaagaagattttcagaagctgctttgtgatgtgtgcattcttctgacagagtttaatctggcttttgattaaacagtttagaaacactgtttttgtagaatctgtgaagggatatttgagagcccttcgaggactacagggaaaaaggaaatatcttcagataaaaactagaaagaagcgttctgagaaactgctttgtgatgtgtgcattcaccatatagacttaaaacattcttttgattgaccagtttggaaactctgtttttgtagaatctgcacagagatatttgggagcgcctttaggacaatggggaaaaaggaaatatcttcacataaaactagaaaaagactttctgagaaactgcttggtgatgagtgactttaactcagagagctaaacctttttttggttaagaagtttgacaaaattgtttttgccgaatctgcaaaaggatatttccgagtgcattgaggcctatggtgataaaggaaatatcttaagattaaaactagaaagaagctttctcagaaactactttgtgaattgtacattcttatcacagagttaaacttttattttgattgagcaatctagaagacctgtttttgtaaaatctacaaagagttgtatgggagggcctagaggcttatggtgaaaaaggaaataacttcagaggaaaactagaaagaagttttctgggaaactgctttttgatgtgtgcatttatctcacagagttaaacctttcttttgattgagcatttggcaactccatttttgtataatctagaagggatatttgggagcactttgaggcctattttccaaaagaaatatcttcaggtaaatactagggagatatttgccgggaaacggctttgtgatttgtgcattcatctcaaggagttaaatggctttgggatgtgtgccttcttctcaaagagataaacttttcttttcatggagctgtctggaaacacagattttgtagaccctacaaggattatatgggagcacatttaggcctgtggtgaaaaaggaaatatcttcagagaaaaactagaaagaagcattctgagaaactgctttgtgatgtgtgcattcatgttacatagttaaaactttcttttgattgaatagtttggaaatactgtttttgtatattctgcgaagggatatgtgggattgtattgaggcctaaggtgaaaaaggaatattttcagagaaaaacttggaagaaactttctgagaaactgctttgtgaagagtgctttcttctcacagagttaaacctttcttttgattgagcagtttggaaacactcttttggtagaatctgcgaaggaatatttgggagcactttgaggcctattgtgataaatgaaatatcttcagataaaaagtagaaagaagcctctatgaaaatgctttgtgatgtgtgcattcacctcatagagttaaacctttctttttattgagaaattttgaaatactcttttgatacaatctgtgaagggatatttgggagtgcattgaggcctacagtgaaaaaggaaatatcttcagataaaatctagaaagaagctttttgagaaactcctttctgatgaatgcattcatctcatcgagttaaacctttcttttaagtgagcagtttggaagcaacattttggtgtaatcagccaagggataattgggagcacattgaggacttaggtgataaagaaatatcttcaaagaaaaactgctttgtgatctgtgcattcacctcacaaagttaaacctttattttcattgagcagtttgggaacagtgtttggtagaatgtgtgaagggatatttgggagtgctttgaggcctatggtgaaaaaggaaatatcttcacataaaactaaaaagaagctttctcagaaactgcttctcattcttcttacagagttaaacctttcttttgattgtgcagtttggaatcactgtttttgaaatatctgcaaaaggatattttggtgtgcattgaggtcaattgttaaaaaggaaatatcttcagataaaaactagaaagaagttactcagaaatcactttgtgatatgtgcattcttctcacagagttaaactttcttttgattgagcaatttggtaacagtgtttttggagattctgagaagagatattttgaagagctttgagtcctatggtgaaaaaggagatatcctcagataataactagaaagaagattcctggaaattgctttgtgatgtgtacattcatctcacagagttaaaccattattttgattgagcagcttgtaaacagtgtttatgtaaaatctaccaagggatatttgggagcactttgaggcctacagtgaaaaaggaaatatcttcagaaaaaaaactagaaagaagcattctgagaaactgctttgtgatgtgtgcattcaacatatggaattaaaactttcttttgtttgagctgtttggaaacactatttttgtagagtctgagaagggactttttggagcactttgaggcttatggtgaaaaaggaaatatcttcagctaaatactagaaagaaactttctcagaaactgctttgtgatgtgtgcattcttctcacagagttaaacctttcttttgattcagcagtttggaaacactgtttttgcgaatctgcaaatggatattgggagagcattgaagcctaggttgaaaaagaaaatatcttcagaaaaaaacaagaaggaagctttccaaaaaagtgctttgtgatgttcgcattcatctcacagacttaaacctttcttttgattgagcactttggcaacagtgtttttgtagtttctgagcagggatacttgggagtgctttgaggtaaatggtgaaaaaaagaaatatcttcagataaaaactaaaaggaatctttctgagaaattgctttgtgatgagtgcattcatctcacagagtttaaactttcttttgattgagcaatttggcaacactgtttgtgtaaaatctgtgaagggatatttgagagtgcattgaggcctattgtgaaaaaggaaacatcagagaaaaaactagaaacaagctttctggacactgttttgtgatatgtgctttcccaatgctgtgaacatctgcttctctaggataggaatattgattatgtgaaacctccctaaatgcacgcttgtttataggctctctgcagggggaaacacatcatgtgttgttggcttattctggcatcccaacctggcattgtctttacacaatccaacatgcaattttgtatttacaataatcaggagcatttcatcttttatcctgtagcaatagtttcaggggttccccctacacatttggaagcccataaaggcatatggcaagaaaccgaatatctccagataaaagctagaaagaaggtacctgtgaaagtgtcttgtgttgtgtggattcatatcacagagttaaacatttctttgcatgtagcagttttggagcactctttaggtagaatcagtgaagaaatatttggggccatggaagcctataatgaaaacctgaacatccccagataaaaactaggatgaagctgtctgtgaaacttcttagtgatgtgtgaattcatctcacagaattaaacatttgatttcatacagcagatttgaaacacttgttggatagaatctgcgaagaggcatttggaaacccatagaggcctagggtgaataaccaaataaccacagataaaaattagatataagctatctgtgaaactgcattgtgatgtgtggattcacctcacacagttaaacatttgttttgatctggcatgttaaaaacacttttttttctaggatctgtgaatgaaagatttggagtccattgaagcctatggggaaaaaatgaatattaccagataaaaactagaaagaagctatctgtgaaactgttgaaggaagtcagagaccccaaacagagggagcagctgaagccatggcagaagaaggtggattgtgaagattttatgaacatttattagttccccaaattaataactttataattttttatgcctgtctttacttcaatctctaaacataaatcgtaaagatttcttggacatttatcacttccccaatcaatatccttgtgattacctatgcctgtctttacttcaatctcttaatcctgtcagctgaggaggatgtgtgtcccctcagaaccctatgataattgcattaactgcacaaattgtagagcatgtgtatttgaactgtaagaaatctgggcaccttggaaaaagaacaggataacagcaatgtttaggaaacaagagagataaccttaaactctgatcaccagtgagccaggtggaacagggccatatttctcttctttcaaaaacaaacgggagacatatcactgaattctttttctcagcaaggaacatccctgggaaagagaatacacacctgggggtaggtctacagacggcccccctgggtgtggtcgtcttttatggtcagtagactgttgggatgaaatagaacccagtctcccatagtgctcccaggcttattaggaagaagaaagtcccacctaataaattttggtcagaccggttgctctcaaaactctgtttcctgataagatgttatcaatgacagtggtgcccaaaacttcattagcaattttaattttgccccagtcctgtggtcctgtgatttcaccctgcctccatttgccttgtgatattctattaccttgtgaactacttgatgtctgtgacccacaccctattcctatactccccttttgaaactccctaataaaaacttgctggttttacggcttgtggagtatcacagaacctaccaacatgtgatgtttcccccggacacccagctttaaaatttctctcttttgtactctgtccctttattctcaaatggccaatgcttagggaaaatagaaaagaacctacatgactatctgggcaggttcaccggtatctggtgcccatgtagtctttcttttttcttaagtgcatgagggagcccaattccctttggtaggtgtggtgaaacgtcatcagcttggtccacagatacacgtgtttgactccctgatgagtggtgagtagtctgtgtatggtctgggttaactatgagtcatgtggagtctatgcatcatacttatctctgctatactaaactcctgttaaaacagggcggtatttgagtgcctatggaaaatatggtcactctattcagggcagtagaaaaatactgtccttggtttcctgaaaaagaaaccttaggtgtagaactatgggatcatgttggtacaacattcagggaactggtctccacagggaattatgttcccatcactgtttcgggtgactggaccttggtatgtgctgtcctgatgacataccaatcctgtggccccttacagttaccacaattttctgaatctgatgatcctccacattttcctcagccttactctcctgcacagctttcattatctgaacagcctctctctccagctactcctcccctacctgacaatgtagggaattcaatgtctaactccggtaactttgacttatggtcaccccttgatgatcttatttcttttcatgaagagccagtacgtgtaactcctgtggccctgactcacacagccaggatcctatatatgctaatccttctcttctcaaacctccagatcacctagtggctctgggaccaaactaccaaactacactttacctataattctgcaggccctgccccatccacttcagcccctcaacctcctgtcattttggttcctcaactggtcactttactgtccactcagcctgcttctctgtactcttcttcacatgtgaacaccagtaatcaccagtatacttctgctcctccaatgcccctttctcacactctcattctggtccaaccctctcaccctcagtttcccttatctacacatgcttttcctgtcacttctatgccgactccgtctcagatgcctactcatgaaacttcaatgcaatgcttattacgccaaaacaaagaaacaagtggattagatacatggacttatctggtcatgctaggcccacctaacttccaagggttacaaatgcatcattatgtacctcttactcttacatttttttaagaatttaaggatgcttgttcaagtatggtcctacttctccttatgttaaaatggttttacaaactttttgtactgagttcactttacttccttttgattgggacctgttggcaaaagctgttctaaccccagctcatcatttacaattctgtatctggtggtcagaggaggcccttttgcagactcagctaaattggagtaatggcattctaattactcaggctcagctcacaggctccaatagtttctctgatgcttatgcccaattaaactttgatgcccttaccacagaacaagtaacaaaggtgtatatgagagtttgagataaattatgcactccaggccaagcttctgtttcttttaccatggttaaacaaggtcactctgaattataccctgattttttagctaaattacaagatgctgttgaaaaatctgtctctgatgagcatgctcaaggcattctccttcgtatgttagcttttgaaaatgcaaaccgtgaatgtaaaatggccatgcgttctgtgtaatgacaaaatttacctgatcacgaggtgttgctagcatgtattaaagcttgtgaaggcattggatcagacacccacaaagctattctgtgggcatgggccatgaaggacatcaaccaaactggtcccactaattcttctcttgcagcatgctataattgtggccaacttggtcatattcgaaaaatttgtgctgttaaaaacttacaagtggccaagctggttcaacaaacacagacaaatcctgctcctattgtttgtccacgttgtcacaaaggtaaacattggcaaatatttgtcactctaagtatgatatagatggaaaccctctaccacaatgtcagggaaattgggagcagggctgatcccaggccctgacatcaaatgggacacttccaactcagaccaatgttgtgtttccacttctggtggtcccaacgcaacctgcagcacaaacaaatctacctacagccaaaccatatgggtcccagcctcttcttctgtctccgtacaatgattgtccatctccatattaaaaggtggggcagtggatctctgtagtactattcctctgaatttacttcctgattctttgcccttggttgtccccacgggggtcactggccctttacttcaaggttcggtgggcctggtgttaggtagggcatccaccactgctaaaggaatcaccattcatactggtctcattaattctgattctgttgatgagattaaattaatcatttctgccaaggtttctgtttccattccagccagtgagtcagttgctcaattgcttttactacctaatatcattttaaagatttgaaacactggttggatagaatctgcaaagggacatttggaaacccatagaggcctagggtgaataacaaaataaccacagataaaaactagaaataagctgtctgtgaaactgcattgtgatgtgtggattcacctcacacaattaaacatttattttgatacagcatgttaaaaacactcttttctagaatctgtaaaggaaagatttggagcccattgaggcctatggggaaaaaacgaatattaccagataaaaactagaaagaaactatctgtgaaactgctttgagatgtgtggattcttcttacagttttaaaactttcttttgatgcagttggttggaaacacttttttggtagaatctgagaagggacatttgcaaacccattgaggatatggtgaaaaactgaatatcccaacataaaaactagaaagaaaccgttaatgaaactgcttggtgatgggtggattcacctcacaaaggttaaccttttttttttattcagcaggttggaaacactcgttttgtagaacctgcaaaaggacatttgggagtccactgaggtctatgttgaaaaatggaatatcgccagataaaactagaaagaggttatcaatgaaactgtattgtgatgtgtcgattcttctcacaaagttaagcatttcttttgattcagcagcttggaaacactttttgtagaagctgcaaagggacatttgagagcccatagaggtctatggtgaataaccaaatatcttgaggtgaaaactagaaagatgctatctgtgaaactgctttgtgatatgtggattcatctcaaaaagttaaacatttcttctgattcagcaggttgcaaacactttttttgtaaaatcagtgaagggacttctggagccctttgaggcctactgtaataaaccaaatatttccataaaaaaataagagagaaactatctgtaaaactgctttgtgatgtgcttattcatctcacagagttacacctttcttttgatactgcagcattgaaatacactttagtattcaccaatctgtgaatggacattttggagcccttagaggcctatggtgaaaacccaaatatatccagataaaaacttcaaagaagctatctgtgaaaattctttgtgatgtgaggattcatctcacagagctaaaactttctttttcttcagaagtttggaaacattattttggtaaaatctgtgaagggacacttgggagcccattctgaaaaattgaatatccccagaaaaaaaaaacccaaaaatctatctttgaaaatgctttgtcatgtgtggattcatctcaaagagataaacctttttctaattcagcatgttggaaatgctctttggatagaattacaaagggaaagtttggagcatatagaggcctatatagtggtgaaaacttaatatccccagataaaaactacaaggaagctatcattgaaagtgctttgtgatgtgtggattcaactcacaaaattaaacttttctttttgattcaggagtttgcaaatacttcctttccagagtctgggaagggatatttgagagcccattgatgcctatggtgagaaactgaatatcaacagataaaaactagttagaagctatctgtgaaactgctttgtactgtgtggattcatcttacagagttaaacatacgttttgattctggaggttggaaagacacttcaggtagaatctgcgaagggacatttgggagcccattgacgctgatggtttaaaactgaatattccaaggtaaaaactataaaaaacaatctttgaaactgcattgagatgcgtggattcatctcagagttcaacttttcttttgattcagcaggctgcatacacttttttggtataatctgtgcagggacatttgggagccctttcacacctgtcatgaaaagccaaataatcccaaataaaaactagacagaaactacctatgaaactgtattgtggtgtgtggattcatctcattaatttaaacctttcttttgatgctgcagattgaaaaactcttttggaagaatctgcaaagggacatttggaagcccatagaagatgattgacaaaaaccaaatattccaagatgaaaactagaaacaagctatatttaaagctgtattgtgatgagcagcttcatctcacagagtcaaacctttctttggaaacagcaggatggaaactctctttttgtagaatcttcaagggacatttgggagcccttttaggcctatggtgaaaaaccaaatatccccagacaaaaactagaaacaagctatctgtgaaactgctttgtgatgtgtggattcatgtcacagatttcaacctttcttttcattgagcgagctgaaaacactctttttttttttttttggaatctgcaaagggaaacatgggagcccataaaggcctgtggtgaaaaactgaatatccccagatgaaaactagaaacaagctgtctgtgaaactgcatggtgatgtgtgatttatctcccatagttaaacatttcttttgattcagcaggttgcaaacactgttttagtagaatctgtcaaggtatatttgggagcctattcaggcctatggtgaaaaaccgaatactttcagaaaaaattctgaaagaagctatctgtgaaactgctttttgatgtgtggattcatctcacagagttaaacatttctttagatacagcagttttgaaatattctttaaatagaatctgtgaagagacgtttttaagcccctataggcctaagttgaaaaacagaatattgccagataaaaactagaagaagctatctgtgaaactgctttgtgatgtacggattcatctcacagaattaaacctttcttttgattcagcagcttggaaatacttttttggcacaatatgccaaggtacatatgggagccctttgaagcctatggtgaaataccgaatatctccggataaaaactagaatgaagttatctgtaataatagtttctgacgtgtggattctttgcagagtttaaagtttatttgattcagcaggttgcaaacactcctttgctagaatctgcagagggacattccaagtctactgtagcctatggagtaaaacagaatatcccaggataaaaactagaaagaagctatatgttaaactgctttgtgatgtgtggattcatctcacagagttaaaggtatcctttgcttaagtagcttgcaaacactccttttgtaggatctgccaagggacatttggtagtactttgagaactgtagtaaaaaaccgaatatcctcagataacaacaggaaagcagctatagttacaactgccttgtggtgaacgcattcatctcacacagttaaacctttcttttgatttagctgtggttgaaaacactctttttgtagaatctgagaagggatctcagggagcccattgaggcctttggtgaaaaacaaaatatccccagaataaaattagaaagaagctatctgtgcaattgctttgtgatgtgtggattcatctcacagttttaaaactttcctctgatttaacggctggaaaccctatttttgtagaatctgcaaagggatatttgaagtccctttgaggcctcttgtgaaaaactgattatccccagataaaaacaagaaagaagctatctgtgaaaccactttgtgatgtgtggattcatctcacagagttaaacctttcttttaattcacctatttgcatacactccttttgtagaatctgtgaatgaatagttgggagcccatttcagcctatggtgaaagttaaaatatccccaggtaaaaactagaaagaagttaactgtgagactgctttgtgatatgggaattcatgtcacagagttaaacctttgttttgactgagcatgttggaaataatcttttggcagaatctgttgaggtacattagggagccctttgcaggttatggtgaaaaacaaaatattcccagataaaaagttggaagaagctatctgtgaaactgctttgtgatgtgtggattcatctcacagagttaaacctatctttgattcagcagtatgaaacactctttcacagaatctgcgaaaagacattagaaggcgaatgaagcatacagtgaaaaaccgaacatccccagataaaaactagaaaagagcaatctgtgaaactgctttgtgaagggtggatgcatctcacagagttataccattcctttggttgggtaggttgcaaatacttcttttgtagaatctgcaagggacattcaggagcccatcgaggactatggtgaaaaacaaatttccccagataaaaattcgaaagaaactatctgtgaaactactttgtgatgtgtggattcatctcaaagagttaaacccttctttagtttcagcaggttggaaacactcgttctgtagaatctgcaaagggacatttgtgagtcaattgagccttatgatgaaaaaccgaatatacgcagataaaaactggaaagaagctatctgcgaacctgctttatgatgtgtggattcaactcacagtgttaaacctttcttttcattcagcagcttgcaaatactctttttgtagtatctgaaaagggacacttaggagccctttgaagactgtagtgaacaacttaatatcttcacataaaaaccagaaagatgctatccgtgaaactgcttttttgatgagtggattcgtctcacagagttaaacctttcctttgattcagcaggttggaagcactcattttgtagaatctgcaaaaagatattttgaagcccattgtggcatatagtgaaaaacccaatatccccagataaaaactagaaagaagctctttgtgaactgctttgtgatgtgtggattcatctcacagaggtaagcctttctttcaatttaccgtgttggaaacactcttttggtaaaatctgcaaagggatatttgggagccttttgtggcctatcgtgaaaaaccaaatgtccacaggtaaaaacactcattttgtataatatgctaagtgatatttggaagcccattgaggcctatggtgaaagagagaatatcaccaggtatctgtgaactgctttgtgacgtctggattcatctcaaagagctacaactttccttaatacagtgtgttggaaacactcttttcgtagaatctgcaaagccctttgaggcctatggtgaaaaaccaaatgtccacaaataaaaactagaaaggagctatctgtgaaattgctttgtgacgtgtagatttctctcaccaagttaaagctttcttttgatacagcaggattgaaacactctttagctagaatttgtgaagggacatttgaaagcccatagaagccattgttgaaaaacagaatatccccagataaaaaccagaaataagctatctgtgaacctgcttttttatgtgtggaatcatctcagagagttaaacctctcttttgattcagcaggttgtaaacatctgctagtatctgagaaaggacgtttgtgagcccaatgtagcacactgtgaaaaattgaatattcaaagataaaagctagaaagaagcttttagtgaaactacttagtaatgtgtggattctactcacagagtgaaacttttctattgttcagcagtttggaaacactcgtttggtaaaatcaggaaattgacatgtgggagcccattgagacctatggtgaaaaaccgtatactcccagataaaaacaataaagaagctacctgtgaaactgctctgtgatgtgtggattcatctcacagagtcaaacatctattttgattaagcagtttggaaacacttgtttggcaggatctgtgaagggagatttggaaactttttgaggtctatggtgaaaagcagaatatccacagatgaaaacaacaaagcagctatctgtgaaatggctttgtgatgtgtgtattcatctcagagggataagcctttgctttgattcagcaggtgggaacactcgttttgtagaactgtgaagggatattttgaagcccatttgaggcctatggtgaaaaaacaataaccccagttcaaaactagaaggaagctacctgtgaaactgctttgtgatgtgtggattcaccactcagatttaaacctttcttttgatacagcaaatttgaaatactctttaggtagaatatgtgaagggtcatttgggagcccatggggacctagggtgaaaaaataatatccccagataaaaactagaaagaagctatctgtgaaactgctttgtgatgtctgtattcatatcacaaagttaaaactttctttgattcagcagttacaaacactctttttatagaatctgcgaaggtacatatgggaaccctttcaggaatgtagtgaaaaaacaaatacacacagatacaaaccagaaagaagctatttgtgaaactgctttttttttttttgtggattcatctcatggagatgaatttcctttgattgagcaggttggaaacactctttcatataatctgaatggggcattttgaagccctttgaggactatggttaaaaaaaaaacacagtatccccagataaaaactaggaagaagctatctgtgaacttttttgtgctattttgagctatttgtgaaactgttttgtgatgagtggattcttctcacagagttaaaccttttcttttattaaccaggtttgaaacactcttttggtagaatatgggaagggaggtttggaatccaatagagaactatggtgaaaaaatatccccagatgaaaactagaacgaagctctctgtgaaactgcttagtgatatgtagattcatctcaaagggttaaacttgtttttgattcactaggttagaaacactctttttctggaacctgcaaagggacatttatgagcccactgtagtctatcgtaagaaaccaaatatcccaagatcaaaactagaaagaggttatctgtgaaacttctctgtgatgtgtggattcatcccagagagttgaacctttcttttaattcagcaggttgcaaactgtacttttgcagagtctgtgaagataattttgaaagccgtttgagtcctttggtaagaaaccatatgtccacagataaccactaggataaaagtatctgttaagctgctttgtgatacgtggattgatctcacagagatcaacatttcctttgattcagaaggttggaaacactcgttttgtagaatctgcatggggcattttgaagccctttgaagcctatttaaaaaaatacaatatctccagataaaaactaggaagaaggtatctgtgaacttctttgtgatgtgtggattcatctcacagaggtacatgtttcttttgttatagcatgttggaaacactgttttcatagaatctgcaaagagaaatttgagagctttttgtggcccatggtgaaaaaccgaatgttcacggatgaaaactagaaagaagctatctgtgaaacagccctgtcgtctgtggattcatctcacagagataaacctgtctattgaatcagcaagttgcgtacactctttttatagagtctgcaaagaaattttgggagtccattgaggcctatgatgaaaaacgaatatccccagataaacactggaaaaaaaagtgatctgtgaaactgctttgtgatgtgtggattcatctcacagggttaaacctttctttggatttaacaggttggaaacactctttggttagaatttgtgaaggaacatttgggagcccctggaagcctatggtgaaaaacaaaatatccccagattaaaaccaggaagaagctgtctttgaaactgctttgtgatgtgtggattcctctcaaagacttaaatctttctttttactcagtatgttggaaacactcttttgctagaatctgcaaaatgagatttgtgagcccactgtagtctagggtaaatatatatatatgtatttcaagatagaaactagaaagaagatgtcagtgaatgtgctttgtgatgcgtggattcatctcacagagttaaaattttattttgattcagcaggttggaaacacctttttgtagaatctgccaacagaaatttgagagacctttgaggcctagaatgaaaaccagaaaatccccagataaaaactagaaggaagctctttctgaaactgtttgggatgtgtttattcatctaacagagttaaacttttctgtcaatatagcatgtttgaaatattttttagatagaatctgtgaagggacatttaagagcctatataggcctatgatggaaaacagaatatcccaagataaaaactagaaaaaagctaaatatgtaactgctttgagatgtatggattcaactcacagagttaaacatttctttaaacacagcagctatgaaacactttttagttagtatctgtgaagggacatttaagagcccgtagatgactacagtgaaaaactcaataacttcagatgaaaactagaaagaaaccatctgtttaactgatatgtaatgtctggatttatctcagagagataaacatttctattgatttagcaaattggaatcactcttttggtagaatctgccaagtgacatttgggatcccatggaggcctactgtgaaaaactgaatataccttgataaaaactagaaagaagctatctgtgaaactgcattgtaaagtgtggttttaggtcacagagttaaacatttcttttgactcatcaggtaagaaacactcgttttgtagactctgtgaagagacattttggagcccattgagtcctatggtgaacaacataatatttccagataaaaaccagaaggaagctatctgtaaaacccctttgtgttgtgtgcattcttcttacagagctaaacctttattttgattgaacaatacggacacacagtttttgtggaatctacgatgggatatatgggagcacattgagacctacagtgaaaaaggaaatatcttcagagaaaaactagaaagaagctttctaagaaactgctttgcaaagtgggcattcatctcacagagttaaactttcttttgattgagcagtttggaaacagtgttttggtagaatctgcaaagggttatttgggagtgcattggagactatggtgaaaaaagagatatcatcagagaaaaaccagaaagaagctttctgagaaactgctttgtgataagtgcattcatctcacagagttaacactttcttttgattgagaagtttggcaacaccgtttttgtagaatctgagaagggctatttgggaatattttgaggcctatggtgaaaaaggaaatatctacagaaaaatactagaaggaagctttctcagaaatccctttgtgatttgtgcatccatctcacagagttaaacgtttcttttgattgagcagtttggaaacactgtttttgtagaatctgcaaagggatatttgggagtgctttaaggactgtggtgaaaaaggaaatatcttcagaaaaaaacaaaaagaagcttcttgagaaattgctttatgatgagtacattcatctcacagaattaaacccttctattgaatgagcagtttggatacactgcttttgcagaatctaaaaagggatatttgggagcacattgaagcctatggtgaaaaataaaatatctaaagaaaaatactagaaagaaactttctcaaaaatcccttagtgatgtgtgcattcttctcacagaattaaaccttgcttttgattgagcagtttggaaacactgtttttgtagaatctgtgaaaggatatttgggagcgctttgaggcctatggtaaaaaagaaagtgtcttcagataaaaactacaaagaatcttctcagaagctgcattgtggtgtgcgcattttctcacagagttaaatctttattttgattgagcaaattggacacaccctttttatggaatctaaaaagggatacttgggagcccattgggccctagggtgaaaaaggaaatatattcagagaaaaacagaaagaagctttctgagaacactgttttgtgatgtgtgcattcacctcaaagagttaaacatttcttctgattaagaggtttggaaacactttttttgtagaatctgcctagggaaatttgggagtgcattgaagcctatagtgaaaaagaaactatcttcagaaaaatactagaaataatttttctcagaaatccctttgtgatgtgcacattcttctcacagaattaaacttttcttttgattgtgcagtttggagacactatttttgtagaatctcagaagggatatttgagagctctttaaggcctatggtgaaaaagaaaatatcctcagggaaacactagaaaaaaaaatcctgagaaattgctttgcaaagtgtggattcatatcacagagttaaacctttttttgattgagcagttgtaaacactgttttggtggaatctgcaaagggatatttgggagtgccttgaggcccaaggtataaaaggaaatatctacagatcaaaactagaaaagctttctgagaaactgttttgtgatgtgtgcattcatctcacagagttaaacctttcttttgattgtgcagtttggaaacactgtttttgcataatctgtgaagggatatttcagagcactttgaggcctatggtgaaaaaggaaatatcttcacataaatactagaaggaagctttctgtgaaactgcttttggatttgggcattcatctcacacatttaaacgtttcttttgattgggaagtttggaatgactgtctttgtagaatctgtgaagggctatataggagtgcttcgaggcctatggtgaaaaaggaaatattttcagaaaaatactagaaagagactttctcagataccactgtgtgatgtgttctttcttttcacagagttaaatgtttcttttgattgagcagtctggaaacactgtttttgtagaatctacataggtatgtattggagcacatagaggcctatggggaacaaggaaatacgttcagagaaaaactagaaagaagctttctgagaaactgctttgtgatgtgtgaattcatgtcagagttaaactctttttttttgattgagcagtttggcaacactgtttttgttgaatctgaaaagcaatatttgggggcgcattgagtcctatgccaaaaaaggaaatatcttcagataaaaactagaaagaagctttctgagaaatggctttgtgatgtgcgcattagtcccactgagttcagcctttcttttgattgagctgtttataaacactctttttgtagaatctgcaaaaggatctttgggagtgctttgaggcttatggtgaaaaaggaaatatcttgagaaaaactaaaaagaagctttctgagaaactgctttgtgatgagtgcattcatccctcagaattaaacttttctatttactgagcaatttggaagcactgtttttgtagagtctgcaaagggatacttaggagctccttgaatcctatggtgaataaggaaacatcttcagataaatactagaaagaagctttctcagaaacccgttggtgatgtgtgcattcttctcacaaagttaaacctttccttgattgagcaatttgtaaacactgtttttgtagaatgtgtgaaaagatattttggagcaaattgagttctatggtgaaaaaggaaatatcttcagaaaaaacgagaaggaagctttcacagaaaccaccttgtgatgtgcacattcatcttatagagttaaaactttgttttcatttagcagtttggagacactgtttctgtacaatctgcaaagggctatttgggagcttattgagacctatggagaaaagggaaatatcttcagagatgaattagaaagaagctttctgagaatctacttggtgacaagtgaattcatctcatggagttaaacattccttttgattgagcagtttggcaacagtgttttgtagaatctatgaagggatattttggaacacttagaggcctatggtggaaaatgaaatgtattcagagaaaaactagagagaagctttctgagaaactgctttgtgatgagtgttttcctctcacgaattaaaacgttcttttgattgagcagtttggaaacactgtttctgtaaattttaccaaggtgtatttgggaacgcattgagacctatggtgaaaaaggaaatatcttcaaataaatactagaaagaagctttctgagaagctgctttgtgatgagtgtattcaccatatagagttaaaactttcttttgatagagcagtttggaaacactgtttctgtaaattttaccaaggtatacttgggagcacattgaggcctatggtgaaaaaggaaatagcatcagataaaaactagaaagaagctttctgagaagctgctttgtgatgtgtgtattcatgatacagagttgaaacttagtttggaaaaactgtttttgtaggatctgcgaagggatgttgggagcatattgaagcctacagtgaaaaagtaaatatcatcagataaaaactagaaagaagttttctcagaaactgctttgtgctgtgtgcattttctcacagagttaaacctttcttttgattgagaagtttagaaatactatgttggtaggaaattcaaagggatatttgggagcgacttgaggcctatgttgaaaaaggaaatatcgccagataaaaactacaaagaagttttctcagaaacttctttgtgttctctgcattcttctcacagatttaaaactttcttttgattgagcagtttggaaacactgtttttgtagaatctgcaaaggcatatgtgggagcccattaagacttactgtgaaaaaggaaatatcttaagggaaaaactagaaacatgctctctgagaaactgtttgtgatgtgtgcattcatatcgcagagttaaacttttcttttgctaggacagttgggaaacactgttttggtagaatctgtgaggggatgtttgggactgcatagtggcctatggtgaaaaatgaaatattttcagataaaaagtagaaagaatctttctgagaagctgctttgtgatgaatgcattcatctcagagggtttaaactttctttgactgagcagtttggcaacagtgtttttgtagaatctgagaaggaatatttgggagcgatttgaggcttatgttgtaaaaggaaatatcttcagataaacactgaaacaagctgtctgggaaacatttttctgatgtgttcattgatctcacaaagttaaacctttcctttaattgagcagtttggaaactctgttttggtagtatccgtgtagcaatatttgggagctcattgatgcctatggtgaaaaaggaaatatcctcagataaaaatgagaaagaagctttgtcagaaactgctttgtgatgtgttcattcttcccacatagttaagcctttcttttgagttagcagtgtggaaacactgtttttgtagaatctacaaaaggatataagggagcctattgaggcctatggtaaaaaaggcaatatcttcaaattaaaactagaaagaagtattctcagaaaccactttgtgatgtttgctttcttctcacagtgttaaatctttattttaatgatgagtagtttggaaacactgttttggtagcatctgtgaagggatatttgggagctgtttgagtcctatggtgaaaaatgcaatatcttcagataaaaactagaaagaagctttctcagaaacagctttgtgatgtgtgcattcttctcacagagttaaatctttcttttgattgatcagtttggaaacactgttttggtagcatctgtgaagggatatttgggagctctttgagaactatgtggaaaaaggaactctcatcagatgaattctagaaagaacctttctgagaaacagctttgtgatgagtgcatttgtcttaccaagttaaacctttcttttgattgagcagtttggaaacacagtatttgtagaatctgataagggatatttgggagcattttgaggcctaaggtcaaaaacgaaatatcttcagataaaaactagaaaggagctttattttttaatactttaagtttcagagtacatgtgcacaacgtgcagtgttgttacatatgtacacatgtgccatgctggtgtgctgcacccattaaatcgtcatttagcattaggtatatttcctaatacaatccctccctcctcccccaccccacaacagtccatgttttgtgatgttcccctttctgtgtccatgtgttctcattgttcaattcccacctatgagcgaggacatgtggtgtttcgttttctgtccttgcgatagtttgctgagaatgatggtttccggcttcaaccttgtccctacaaaggacatgtactcattattttttatggctgtatagtcttccacggtgcatatgtgccacattttcttaatccagtctatcattgttggatatttgggttggttccaagtctttgctattgtggatagtgctgcaataaacatgtgtgtgcatgtgtctttttagcagcatgatttataatcttttgggtatatacccagtaatgggatggctgggtcaaatggtatttctagttccagatccctgaggaatggccacactgacttccacaatggttgaactagttaatagtcccaccaacagtgtaaaagtgttcttatttctccacatcctctccagcacctgttgtttcctgatttttaataattcccattctaattggagtgagatggtatctcattgtggttttgatttgcatttctctaatggccagtgatgatgagcatcttttcatgtgtcttttggagattgcaaaaattttctcccattctgtgggttgcctattcactctgatggtagtttcttttgctgtggagaagctctttagtttaattagatcccatttgtcaattttggcttttgttgccactgcttttggtgttttagacatgaagtccttgcccatgcctatgtgctgaatggtattgcctaggttttcttctaggatttttatggttttaggtctaacatttaagtctttaatccatcttgaattaatttttgtataaggtgtaaggaaggaattcagtttcagctttctccatatggctagccagttttcccagcaccatttattaaataaggaatcctttccccatttcttttttttgtcaggtttgtcaaagaccacatagttgtaggtatgtggcattatttctgagggctctgttctgttccattggtcaatatctctgttttggtaccagtaccatgctgttttggttactgtagccttgcagtatagtttgaagtcaggtagggtgatgcctccagctttgtacttttggcttagcattgacttggcaatgcaggctctttcttgggtccatatgaactttaaagtagtttttttccaattttgtgaaaaaagtcattggtagcttgatgggaatggcattgaatctataaattaccttgggcagtatggcgattttcatgatattgattcttcctacccatgaatatagaatattcttctatttgtttgtatcctgttttatttcattgagcagtggtttgtaattctccttgaagaggtccttcccatcccttgtaagttggattcctaggtattttattctctttgaagcaattgtgaatgggatttcacgcatgatgtggctctctgtttgtctgttattggagtataagaatgcttgtgatttttggacattaattttgtatccaggaattgaactcagctctgcaccaagtggacctaatagacatctacagaactctccacccccaaatcaacagaatatacactcttttcagcaccacaccacacctattccaaaattgaccacatagttggaagtaaagcactcctcagtaaatgtaaaagaacagaaattataacaaactctctctaagaccacagtgcaatcaaactagaactcaggattaagaaactcactcaaaaccgctcaacttcatggaaaatgaacaacctgttcctgaatgactactggctacaaaacaaaatgaaggtagaaataaagatgttctttgaaactaatgagaacaaagacacaacataccagaatcactggtacatatttaaagcactatgtagagggaaatttatagcactaaatgcccacaagagaaagcaggaaagatctaaaattgacatcctaacatcacaattaaaagaactggagaagcaagagcaaacacattcaaaagttagcagaaggcaagaatcaactaagatcagagcagaactgaaggaaatagagacacaaaagacccttcaaaaaatcaatgaatccaggagctgttttttttaagagatcaacaaaattgatagaccactaacaagactaataaagaagagaggagaatcaaatatattcaataaaaaatgataaaggggatatcaccaccaatcccacagaaagacaaactaccatcagagaatactataaacacctctaggaaaataaactagaaaatctagaagaaatggataaattcctcaacacatacactctcccaagactaaaccaggaagaagttgaatctctgaatagatcaataacagactctgaaattgaggcaataattaatagcttaccaaccaaaaaaagtccaggaccagatggattcacagccaaattctaccagaggtacaaggaggagctggtaccattccttctgaaatgattccaatcaatagaaaaagagggcatccggcctaactcattttatgaggccagcatcatcctgatgccaaagccgggcagagacacaaccaaaaaagagaattttagaccaatatccctgatgaacattgatataaaaatcctcaataaatactggcaaagcgaatccagcaacacatcaaaaagcttatccaccatgatcaagtgggcttcatccctgggatgcaaggctctttcaatatatgcaaatcaataaacataatccagcatataaacagaatgaacgacaaaaaccacatgattatctcaacagatgccgaaaagacctttgacaaaattcaacaactctgcatgctaaaaactctcaataaattagatattgttgggacgtatctcaaaataataagagctatcaatgacaaacccacagccagtatcatactgaatggggaaaaactggaagcattccctttgaaaactggcacaagacaaggatgccctctctcaccactcctattcaacatagtgttggaagtgttggccagggcaattaggcaggagaaggaaataaagggtattcaattaggaaaacaggaagtcaaatggtccctgtttgcagatgacatgactgtatatctagaaaaccccattgtctcagcccaaaatctccttaatctgataagcaatttcaggaaagtctcaggatacaaaatcaatgtacaaaaatcacaagcattcttatacacccataacagacaaacagagagccaaatcatgagtgaactcccattcacaattgcttcaaagagaatgtgtttgctttgcttttctagttcttttaattgtgatgttagggtgtcaattttggatctttcctgctttctcttgtgggcatttagtgctataaattttcctctacacactgctttgaatgcaacccagagattctggtatgttgtgtctttgttctcattagtttcaaagaacatctttatttctgccttcatttcgttatgtacccagtagtcattcaggggcaggttgttcagtttccatgtagttgggtggttttgagtgagtttcttaatcctgagtcctagtttgattgcactgtggtctgagagataatttgttataatttctgttgttttacatttgctgaggatagctttacttccaactatgtggtcaattttggaataggtgtggtgtggtgttgaaaaaaatgtacattctgttgatttggggtggagagttctgtagatgtctattaggtcctcttggtgcagagctgagttcaattcctgggtatccttgttgactttctgcctctttgatctgtctaatgttgacagtggggtgttaaaatatcccattattattgtgttgaattataagtctctttgtaggtctctaaggacttgctttatgaatctgagtgctcctgtatagggtgcaagtagttagctcttcttgatgaattgatccctttaccattatgtaatggccttctttgtctcttttgagctttgttggcttaaagtctattttatcacagactaggattgcaacccctccctttttttttgttttccattttcttggtagatcttcctccatccctttattttgagcatatgtgtgtctctgcatgtgagatgggtttcctgaatacagcacactgatgggtcttgactcttaatccaatttgccagtctgtgtcttttaaatagagcatttagcccatttacatttaaggttaatattgttatgtgtgaatttgatcctgtcattatgatgttagctggttattttgcttattagttaacgcagtttcttccttgcctcgatggtctttataatttggtgtgtttttgcagtgactggtaccagttgttcctttccatgtttagcgcttccttcaggagctcttttagggcaggcctggtggtgacaaaatctctcagcatttgcttgtctgtaaagtattttatttccccttcacttatgaagcttactttggctggatatgaaattctgggttgaaaattcttttctttaagaatgttgaatattggcccccactctcttctggtttgtacagtttctgttgagagatgatctgttagtctgatcggcttccctttgtgggtaacccgacctttctctctggctggccttaacattttttccttcatttcaactttggtgaatctgtcaattaagtgtattggagttgctcttctggaggagtatctctgtggtgttctctgtatttactgaatttgaatgttggcctgcctggccaaattggggaaattttcctggataatatcctgcagagtgttttccaacttgattccattctccccatcactttcaggtacaccaatcagatgtagatgtgggcttttcacatagtcccatatttcttggaggctttgttcatttctttttttttttttcctctaaacttctcttctcgcttcatttcattcatttgatcttccatcactgataccctttcttccagttgattgaatcggctactgaggcttgtgcatttgtcacttagttctcgtgccatggttttcagctccatcaggtactttaaagacttctctgcattggttattctagttatacatttgtctaatcttttttcaaggtttttaacttctttgctatgggttcaaacttcctcctttagctaagagtagtttaatcatctgaagtcttcttctctcaactcatcaaagtcattctctgtccagctttgttccattgctggtgaggagctgcgttcctttggagaaggagaggcactctgatttttaatattttcagtttttctgctctgtttttccccatctttgtggttttacctacttttggtctttgatgatggtgatgtactgatggggttttgttgtgaatgtcctttctctttgttagttttccttgtaacagtcaggacccccagctgcaggtctgtgtgagtttgctggaggtgcactccagacctcgttgcctgggaatcagcagcagaagctgcagaacagaggatattggtgaacagcaaatgttgctgcctgatcattcctctggaagtttttttacagaggagtatccggctgtgtgtggtgtcagtctccccctactgggggatgcctcccagttaggctacttggggttcagggacccacttgagtaggcagtctgtccattctcagatatcaagctgtgtgctgagagaacaactactctcttcaaagctgtcaaacagtgatatttaagtctgcagaggtttctgctgcattttgtttggctatgccctgcccccagaggtggagtctacagaggcaggcagacctccttgagttgtggtgggctcctcccagttcaagcttcctagccactttgtttacctacttaagcctcagcaaagccccctcccccagcctcgttgctgccttgcagtatgatctcagactgctgtgctagcaatgagtgaggctccatgggcatgggaccctctgagccaggcatgggatataatctccttgtgtgctatttggtaagaccatcggaaaagcacagtattagggtgggagtgacccgattttccaggtgccctctgtcacctctttccttggctaggaaagggaattccctgaccccttgcacttcctgggtgaggtgatgccttgccctgctttggttcactctcagtgcactgcacaaattgtcctgcaaccactgtctgatactcccccatgagatgaacctggtacctcagttggaaatgcagaaatcattcattttagaaaaaggctttctgcagatgctttgtgatgtgtacattcatctcacagagttaaaccactgttttgattgagccatttggaaacactttctgtacaatctaacaagggatacttgggagcacattgaggcctatggtgaaaaaggaaatatcttgagataaaaagtagaaagaggctttctaagaaactgctttgtgatgtgtgcattcttctcaaagagttaaatcttccttttgattaagcaatctggaaccactgttttaatagaatctacaaaaggaatatatgggagtcaattgaggctgattgtgtaaaaggaaatgtattcagataaaaactagaaaggagcattctgagaaactgatttgtgattagtgcattcatctaactgagttaaaactgtcttttgattgagtaatttggaaatactgttttggtagaatctgtgaagggatacgtgggagcacattgtgacctattgtagaaaaggaaataacttcagataaaaattagaaagaatctttctgaggaaatgctttgtgatgagtgcattcatctcacagagttaaacaattcttttgattgagcagtttggaaacactgtttttgtagaatctgagaagggatatttgggagcgctttgaggcctatgatgaaaaactaaatatcttcagatagaaactgaaaacaagctttctgggaaactgctttttgatgtacacattcatctcacagaattaaacctttctttggatggagcagcttggaaacactgttttggtagaatctgcaatgggatattttaaagcacatcgaggactatggtgaaaaaggaaataagttgagagaaaagccagaaagaagcttgctgaggaactttattgtgatgtgtgcattcatctcacagagttaaacctttccttttattgagaagtttggaaaaattgtattggtaaaatctgtgaaaggatatttgggagtgctctgagtcatatggtgaaaaaggaaatatcttcagataaaaactagaaagaagctttctgagaaactacttggtgatatgtacattcatctcagagttaagcctttcttttgtttgagcagtttggaaaaccacatttggtagaatctgtgaaagtgtatttaggagcactttaaggtttatggttaaaatagaattatcttcagataaaaacaagaaacatgatttctcagaaaccactctttgatgtgagcattcatctcacagaattaaacctttctgttgattgtgcagttttgaaacactgttttgtcagtatctgtgaagggatatttgggagcacattgaggatgatgatgaaaaaggaaatagcttcagataaaaactagtaagaagctttctgagaaactgctttttgatgagtgcattcgtctcacagtgttaaaccttttttttattaagccatatggaaacacagtttttgtaggatcttagaaaggatatttgggagcactttgaagcctatggtgaaaaaggaaatatatttagagaaaaactagaaagaaacttcctgggtaactgccttgtgttgtgtgcattcatccaacagagttaaacctttcttttgattgagcagtttggaaacactgttttggtagtatctgtgcagaaatatttgggagcacatagaggcctatggtgaaaaagtaaatacctttagataaaaactagaaaggagctttctctggaaactgctttgtgatatgagcatccttgtcgcagagttaaacctttcttttgattgaggagtctgtaaacactgtttagtagaatctacagagggatataagggagcgtattgagacctatgttgaaacacgacatatactgagataaaaaatagaaagaagttttctgagaaactgctttgagatgagtgcattcatctcacagaggtgacctttcttttgattgagtagttttgcaacactgtttttgtggaatctaagtagggttatttgggagttctttaaggcctagaatgaaaaattaaatatcttcagataaaaactagaatgaagctttctaaaaactgctttgtgatgagtgcattcatctcacagaattaaacctttctttaatttgagcagtttggataaactgtttttgtagaatctacaaatgaatatttgggagtgctttgaggcatatggtgataaaggaaatctcctcagataaaaagtagaaggaaggcttctggataactgccttgtgatgtgtgcattcatctcaaagatttaaatgtttcttttgattgagcagtttggaaacactgtttttgtagaatgtgtgaagggatatttgggatggcattgaggcctatggtgaaaaaggaaatatcttcagataaaaactagaaagaaattttctgggaaactgcttagtgatgtgtttattctcctaacagagttacacctttcctttgattgagcagtttggaaacattgtttttgtagaatctatgaagggaaacctggaagcgcattgtgtcctacgatgtaaaaggaaatatcttgagataaaaactagaaagaagctttctgagaaactgctttgtgatgtgtgcattcatctcacagagttaaacctttcttttgtttgagtggcttggaaaaactcatgtggtagcatctgccaagggatatttaggagcacattgagggctatggttaaaaacgaaatatcttctgataaaaactagtaagaagatttctcagaaaaagttttgagatgtgatcattcatctaacagaattaaacctttcttttgattgtgtagttcagaaacactgttttgggagtatctgggaagctatatttgggagcgcttagaggcctatggtcagtaagaaaatatcttcagataacaactagaaagatggtttctgagaaacttctgtgatgtgtgcattcttccaacagagataaacctttctttagattgagcagtttggaaacactgtttttgtagaatctatgaagggatatatggatgtgaaattgaggcctattatgaaaaaggaaatatcttctgagaaaaactagaaagaagctttctgaataactgctttgtggtgtgtgcattcatctcacagaattaaacctttcttttgattgagcagtctggaaagactgtttttgtagaacaaacgtgggatttatgagactgcattgaggactagggtgaaacaggaagtatcgtcagagtaaaactagaaagaagcattctgagaaactgctttgtgatatgtgcatgcatatcccagagttaaacttttcctttaatcgaagagtttggaaacactgtttttgtagaatctgcaaagggatatttgggagcactttgtgggttatggtgaaaaatgaaatatcttcagagaaaaactcaaaagaagttctctcagaaactgctttgtgaagtgtggtttcttctcacagagttacacctttcttccaattgagcagtttggaaacactgttttggtagaatctgtaaagggatatttgggagtgcattgaggcttatggtgacaaaggaaatattttcagataaaaactagaaagaaggttcttcagaatctgctttttgatgtgctcattcttctcacagaggtaaacctttcttttgattgagcagtctggaaacactgttcttgtagaatctgcaaagtgatatacgggaaagcattgaggcctactgagaaaaaggaaataccttcagagaaaaactagaaggaagatttctgaaaaactgctatctgatgtgtgcattcttgttacagagttaaacctttctgtttattgtgcagtttggcaacacagtttttgtggaatctgagaaggaatatttgggagcactttgaggcctatagtgaaaacgggaaggtcttcagataaaaagtagaaataagatttctgggaaactgctttgtgaagagtgcattcatcacacagatttaaaactttcttttgattgagcagtttggaaacacttttttgcagaatctgggaaaggatatttgggagtgctttgaggcatatggtgaaaaacaaaatatcttcagataaaaactggaaacagtctttctgggaaaccactttttggtgtgtgcattcatctcacagagttaaacctctcttttgattgaccagtttagaaacactgtttttgtataatctgagaagggatatttggaaccacttggtgacctatggtgaaaaacaaaatatcctcagataaaaactggaagcaagcttcccaggaaactactctgcaatgtttgcattcatctcacggaggtaaaccattcttttgattgagcagttttgaaaaatgtttttggtagaatctgcaaagggatattaaggaatgcattgaagcctatggtgaaaaaggaaatatcttcagagaaaatctagaaagaagctttctgagaaactgctttgtgaagtgtgcattcttctcacagagttaaacctttcctttgattaagcagtttggaaacactgtattggtagtatctgtgaagggatatttgggagcactttggggcctatggtggaaaaggaaatatcttcagataaaaactagcaagaacctttctgagaaactgctttgtgatgtgtgcattcatctcacagatttaaacctttcctttctttgaggagtttagaaaaactcttttggtagaatctgcgaagggatatttaggagcacattgagggctatagttaaaaaagaaatatcttcagataaaatctaggaagacagtttctgagaaactgctttgtgttgtgtgtattcatctcacataattaaacctttcttttgattgtgcattttggaaccatggttatgggagtattgcaaaaaaagatatttggatcacattgaggatgatggtgaaaaaggatatatcttcagataagaactagaaagcagctttgtcagaaaccacattggatgtgtgcattcttctcacagaattaaatgtttcttttgattgtgccctttcaaaagtctgttttggtagcatctgcaaaggaatatttgggagtgctttgaggcctatggtgaaagacaaaatatcttcagataaaaactagaaaacagattcctgataaactgcttggtgatgagtgaattcacctcacagaattaaacttttcttttgattaagcaggttggaaacactgttttggtagaatttgcaaagggatatttgggagtgcattggggcctatggtgaaaaagttaatatcttcacatagatactataaagaagctttctctgaaactgctttgtgatgtgtaccttcttctcaaagagttaaacttttcttttgattcaggctttggaatcactgtttttgtagaaactgtgaaaggatatttgggagtacatgaggcctatggtgaaataagttatagcttcagataaaaactacaaagaagctttctcagaaacagctttgtgttatgcacattcttctcacagagttaaacctttttttggattgaatagtttggaaacacagattttgtagaatctgcaaatttatatttgggagcacattgaggcttatggtgaaaaagaaaatatctgcagataaatactagaaagaacctttttcagaaaccagaaactgctttgtgacgtgtgcatttttctcacacatttaagcctttttttttgattgagcaatttggaaagactgtttttgtagaatctgtgaagggatattttggaacacattgaggcctacggttaaaaaggaaataatttcagagaaaaaatagaaaaacctttctgagaacctgctttgtgatgtgggaattcttctcacagagctaaacccttcttttgattcagcagtttgtaaacagttttggtagaatctgggaagggatatttgggagcgtattgaggccaatggtaaaaatggaaatatcttcagataaaaactagaaagaagctttcttagaatccactttgggatgagtgcattcatctcacagagttaaaactttcttttgattgagcagtttgtcacactgtttttgtggaatcttgaaagggatatttggctgtggtttgaggcctatggtgaaaaatgaattactttcagataaaaactagaaagaggcattctgggtaactgccctgtggtgtgtgtattcatctcacagagttaaacctttcctttgattgagcagtttcacaacagtttttttgtagaacctgagatgggatatttaggagaactatgaggcctatggtgaaaaatgaaatatcttcagataaaacaagaaagaagctttctgggaaactactttgtgacgtgtgcattcatctcacagagttcaacctttcttttgattgagcagtttggaacactgttttgatagaatcaggaaagggaaatttgggagtgcattcaggcctagggtgaaaaaggaaatatattcagataacaactagaaagaagctttctcagaggccattttgtgatcttttcattcttctcacagagttaaaccttttcttggttgattgctctggaaaaactctattggtagaatttttgaagggatatttttgagtgcattgaggcctatggtgaaaaaggaaatatcttcagataaaaaatagaaagaagctttctgggaaactgctttgtgatgttctcattcttctcacagagttaaacctttcttttgattgagcaggctggaaacactgtttttgtaaaatctgcaaagagatatttgggagcacattgaggcctatcatgaaaaaggaaatatctttagataaaaacttcaaagaagctttctcataaaccacactgtcatgtgttcattcttctcacagagttaaacctttcttttgattgagccatctggaaaaactgttttggtaaaatctgcaaagggatatttggaagtgcattgaggcctatggtgaaaaaggaaatatcttcagataaaatgtagaaagaagatttcacagaaactgctttgttatgtgtgtattcttttaacagagataaacatttcctttgattgaggagtttggcagcacactttctgtggaatctgagaagggatattttggagctatttaaggcctagggtgaaaaaggaaatatcttcagataaaaagtagaaagaagctttctgcgaaactgcttcatgatatttgtattcatctcacagagttaaacttttcttttgattgagcagtttggcaacagtgtttttgtagaatctgagaagagataattgacagtggtgtgaggcctatggagaaaaaagaaatatctacatataaaactagaaagaagctttctaggaaactgctttgtgatgtatgcattcgtgcacagtgttaaatctttcttttgcttgagaagttttgtaacactgtttttgtagtatctacaaaggaatattttggagcacattgctgcttaagttgaaaaacgaaatatctacagattaatactagaaagaaggtttctcacaaactgctttgtgaagtgtgcattcttctcacagagttaaacctttcttttgatcaaacaaattggaaacactgtttttgtagaacctgtgaagggatattttggagcacttataggcctacgctgaaaatggaaatatcttcagataaacactagaaagacgttttctcagaactactttggatgtgtgcattcttctcatagatttaagcctttcttttgattgagcagtttggaaacactgtttttgtaggatctatgcagggatatttgggagagcattgaggcctatggtgaaaaactaaatatcttcagataaaaaagaaaaacaagctttctgggaaacggctttgtgatgtgtgcattcacctcacagaattaaacttttttttgattgaacagtttgaatatactgtttttgtagaatctgtgaaggtatatctgggagcagttggaggcctactgtgaaaaaggaaatgtcttcagacaaaaagtagaaggaagatttgccaaaaactgctttgtgatgtgtgcattcttctcacagtgttaaatcattcttttgtttgagcagtttgggaaactgttttggtagaatctgtgaagggatatttgggagcaccttgtggcctgtggtgaaaaaggaaatatcttcagagaaaaactagaaagaagctttcagagaaactgttttgtgttgggtgcattcatctcacagagttaaacttttcttttcattgagcagtttggaaacactgtttttttagaatcttcaaagggatatttgggagccattagaggcctatgttgaaaaacaaaacatatttgagaaaaacctgaaagaagctttctgagaaactgcgttgagatgggtgaattcgcctcacagatttaaacttaaattttgattgagcagtttggaaaccctgttttggtagaatctgtgaatggatttctcagagcacttttaggcctatgataaaaaaggaaactttttttatcagggtttttgtgaaatctgagaagggatatttggaaacatttagaggcctatggtgaaaagtgaaatatcttcagagagaaacaagaaagaagctttctaagaaactgctgtgtggtgtgtgcattcatctgacacagttaagcctctcttttgattgagcagtttggaaattcagtttttgtagaatctttgaaaggatatatgggagagaatggaagtctatggtgaaaaaggcaatgccttcagagaaaatctagaaagaagctatctgagaaactgctttgtgaggagtgcattcatctcacagatttaaacctttcttttgattgagcagttttgaaacactgtttttgtagagtctgcaaaaggatatttgggaatgctttgaggcctatggtgaaacaggaaatatcatcagataaaaactagaaagaaggtttctgagaaactgctttgtgatgagtacattcatctcacagagttaaacctctctttggattaagcagttggaaagagtgtttttgtggaatctgagaagggatatttgggaacatttaggggcctatggtgaaaaattaagtatcttgagataaaaaccagaaagaaactttctaagaaacttctttgtgatgtgtgcattcatctcacagaattaaacctctattttgattgagcagtttagaaacactgtttttgtagaatctgtgaaaggatatatgggagtgcattaaagcctatggtgaaaaaggaaatatcttcagagaaaatctacagagaagctttctgagaaactgctttgtgatgtgtgcattcttctcacaatgtcaaacctttcttttgattgagcagtctggaaacattgtttttgtagaatctatgaaggggtatatgggagtgcaccgaggcctatggtgaaaatggaaatatctttgagaaaaactagaaacaggctttctgagaaattgctttgtgatatgtgcattgatctcactgaggtaaacctatcttttgattgagcagtttggaaacactgttttggtagaatctgcaaaaggatatttcagagtgctttcatacctatggtaaaataggaaatatcttcagataaaacctagaaagaagctctctgagaaactgctttgggatgagcacattcatctcacgtagtgaaacctttctttttatttagcagttttgcaacagtgtttttgtagtatctgagaagggctattttggagtgcattgaggcctatggtgaaaaacaaaatatcttcagataaaaacaagaaagaagcgttctgggaaactgctttgtgatgtgtgcattcatctcactgagtaaaacttttcttttggttgagcagtttggaaacactgttttggtaaaatctgcaaagagatatttgggagcccattgtggcctacgctgaaaaatgaaatatcttaagagaaaaactagaaagaagctttctgagacactgttttgtgatgagtccattcatttcagagagttaaacctttcctttgattgagcattttggaaacactcttttcatagaatctgcaaagggatatatgggactacattgagacctatggtgaaaaaggaaatatcttcagatgaatagttgaaagaagtttttcagagtctcctttttgttgtgtgcattcttctcacaaagttaaacctttcttttgattaagcagtttgggaacactgtttagtataatctgcaaaagcatatataggagcacattaaggtgtattgtgaaaaagaaaatctcttcagggaaaaactggaaagaagctttgtgagaaactgtttattgatgtgtgaattcatctcacagagttaacctttcctttgaatgagcagcttggaaacactgttatggtggaatctgcgaaggtatatatgggagcacattgaggcctttgatgaaaaagaaatatctacagagaaaaactagaaagaagttttctaagaaattgcttgtgatgtgtgcattcatctcacagagttaaacctttcttttgattgcagtttggaaacactgttttggaagtatctgcgaagggatgttttggagtgcattgaggcctatggtgaaaaaggaaatatcttcacataaaagctagaaagaagcatcctcagaaaccactttgtgatgtgtgcattcttctcacagagttaaatcttcgttttcatggagagtttggaaacactgttttggtagcatctgtgaagggatatttgggagccctttgaggtctattttgaaaaaggaaatatcttcagataaaaactggaaagaagctctctgagaaactgctttgtgatgaatgcatttgactcgcagagataaacctttcttttgattgagcagtttggtaacactgtttttgtagactcctcgaaggcatatatttgagctcattaaagcttattttaaaggaggaaatatcttcagggaaaaactataaagaagcttcctcagaaactgttttgtgatacgctcattcttctcacagagttaaaactttctttttattaagcaatctggaaacaatgtttttttagaatctgcgaagggatatttgggagctccttgaggcttttggagttaaaggaaatatcttcagagaaaaactaaaaagaagctttctgagaaagtgctttgtgatgagagcactcatctcacagagttaaaacgttcttttgattgagcagtgtggaaacactgtttttgtagaatctgtgatggaatatttgggagtgcaatgaggcctatgctgaaaaaggaaacatcttcagataaaaacctgaaagaaactttttcagaaactgttttgtgatacatgcattcttctcaaagaattaaacctttctttttattgagcagtttggaaacactgtttttgtagaatatgccaagggatattcgggaacatattgatgcctattgtgagaaaggaaatatcctcagataaaaacaagaaagattgtttatgagaaactgctttgtgacatgtgcattcttctcacagagttaaacctttctttagattgagcagtcaggaagcactgtttttgtaaaatctacgaagggatatatgggtgcacattgaggtctatggtgaaaaaggaaattccatcagagaaaaactagaatgaagctttttgagaagctgctttgtgatgtgtgcaatcatctcacagagttaaagttttagtttgattgaccagtttggaaacactgattttgtagaatctgtaaaaggatatttgggagcacattaaggcctatggtgaaaaaggaattatcttcagatgaaaactagaaagatgctttcttgagaaactgatttgtgttgtatgcattcatctcacagagttacatctttattttgcttgagcagtttggaaatactgttttgttagaatctgcaaagggatatttgggagcttcttgaggcctatggtcaaaaaggacataacttcagatagaaactagaaagaagaatttgacgcactgctttgtgttgtgtgcattcatctcacatagttaatgctttcttttgattgagcagcttggggagactgtttttgtagaatctgtgatgggatatttggaagtgcattgaaatctatggtgaaaaaggaaatatcctcagaaaaaaagtagaaatatttctgagtaacagttttgtgagttgtgcactcatctcacagagttacacctttcttttgattgagcagtttggaaacactatttttgtagaatatgcaaagggatatttgagaatgtaataagacctatggtgaaaaaggaaatatcttcacataaaaattaggaagatttctgagaaacagccttgtgatgtctgctttcatctcacagtgttaatcccttcttttgattgaggagcttggaaagacttttttgtaggatctgcaaaatgatatttgggagcacgtagaggcctatggtgaaaaagataatatcttgtgatgaaaactagtaagaagctttctgagacactgctttgtgatgtgtgcattcatctcaaagatttaaacctttcttttgattcagaagtttggcagcactgtttgtgtagaatgtgaaagagatatttgggagtgtattgaggcctatggtgaaaaagtaaatatcttcacaaaaaaagagaaagacccttgctgaggaactgctttgtgatgtgtgcattcatctcacgcagttaaatctttcttttgattgagcagtttggaaaactgtttttatagactctgtctagggacatatgggagtactttgaggcttagagtggaaaaggaaatatcttcacataaaaactagaaggaagctttctcagaaactgctttgtgatgtgtgcattcatctcacagagttaaagttttcttttgattgaccagtttggaaacactgattgtgtagaatctgcaaaaagatatttgggagtgccttgagggctatggtggaaaacaaaatatcttcagataaaaactagaaagttgctttctgagaaactgctttgtgatgtttgcattcatctcacagagttaaacctttctttggattgagcagtttgcaaagactgcttttgtagaatctgcaaagttgtatttggcagcacattgaggcccacagtgaaaaaggaaatatcttcagataaaactagaaagaagctttgtgaaaaactgctttgttacggatgcattcatctcatagagttaaacctttctactgattgagcagtttggaaacactattttggtagattctgcgaagggatatttgggaatgcactgaggcctattgtgaaagaggaaatatcctcagataaatctggaaagttttcagataaatactagaaagtatcttttggaggaactgctttgtgatatgtgcattcatctcacagagttaagctttattttgatttaccagtttggaaaaactgattttgtagaatctgtgaagggatatttggtagcatattgaggcctacagagaaaaaggaaatatcttcagataaatctagaaagaatctttgtgagaaactgctctgtgatgggtgcattcatctcacagggttaaacctgtcttctgtttgagccgtttggaaacagtatttttgtagaaactgcaaaggaatatttgggcccactttgaggcctatgatgaaacaggaaattccttcagataaaaaccagaaagaagctttctgagaaactgctttatgatgtatacattcatctcacgaattaaagctttcttttgattgagctatttggaatcagcatttttgtagaatctgcgaagggacattttggaatgcaatgaggcctatgttgaaaaaggaaatatcttcacataaaaactagaaagaagtttctgattaactgctttgtgatgtgtgcattcatctcacccagataaagctttcttttgattgagcatcctagaagcactggttttgttgaatctacaaagggataatttggagcacattgaggcctatggtgaaaaaggaaatttcttcagataaaaacaagaaagaatgtttctgagaaactgatttgtgatgtgtgcattcatctcacagagttaaacttttctcttgattgagattttggaaacactgtttttatagaatctgtcatgtgatatatgggagtgcactgaggcctatggtgaaaaaggaaatttcctcagataagaagtagaaagaagctttctgattaacagctttgtgatgtgtctattcatctcacagaattaaaactttctattgattgagcatcttagaaacactgtttttgtagaatatttgaagggatatatgggagcatgttgaagcctatggtgaaaaagaaaatatcttcacataaaaactagaaagaaactttctgagaaactgctttgtgatgtgtgaattcatctcaaagagttacacctttcttttgattgagcagtttgtaaaaactatttttgtagaatctgctagggatatttgggaacatattgaggcatatggcgacaaaggaaataacctcagataaaaagtagaaagacttctgagaaacagctttgtgatgtatgcattcatcccacagagttaaattattcttctgattgagcactttgaaaacactgtttttgtaaaatctgtcaagggatgtaagggagcacatagaggcctatggtgaaaaaggaaatttccacagataaaaattagcaggaagctttctgattaacatctttgtgatgtgtctattcatctcacagagttaaacttttctattgattgagcatcttggaaaaactgttttcatagaatctgtctagggacatatgagagggtatcgaagcccatggtgagaaggggaatatcttctcataaaaactagaaagaaactttctcagaaactgctttgtgatgcattcattcatctcacagtgttaaacctttgctttgattgagcagtttggaaacactgttttttttagaatctgaaaaaggatatttgggagtgccttgaggcctgtggtggaaaaggaaatatcttcagataaaaattagaaagaagctttttgggaaacttctttgtgatgtgtgcattcatctgacagagttaatccttccttatgattgagcagtttggaaagtagaatctgcaaaggtatatttggtagcatattgaggcctactgtgaaaaaggaaatatcttcagataaatctagatagaagctttgtgaataactgctttgtgatgagtgcattcatctcacagagttaagcctttcttctgattgagtagtttggaaacactatttttgtatattctgtgaagggatatttgggaacgcatttaggcttatggtgaaaaaggaaataacctccaataaaaactagaaatatttctgagaaacagctttgtgctgtgtgtctttatctcacagagttaatcctttcttttgattgagcagtttggaaagtgtttttctagaacctgcaatgggatactttagaatgctttggtgcctatggtgaaaaaggaaatatcttcagataaaaactagaaagaagctttctgagaaacagctttgtggtgtgtgcattcatctcacagagttaaaactttcttatgattcaggagtttggaaacactgtttttgcataatccttgaagggatgttaaggaatgcattgaggccatgttgtaaaaggaaatatcttcagataaatactagaaagaagctttcagtgaaactgctttgtgatgtgtgcattcatctcacagtgttcaagttttgttttgattgaccagttttgaagcactgattttgtagaatctatggagggatatttgggactgcagtgaggcctatggtgaaagaggaaataacttcagatgaaaactagaaagaatctttctgtgaaactgctttgtgatgtgtgcattcatatcacagattaaaacctttcttttgattgagcagtttggaaaccctgtttttgtagaatctgtgatgggatattagggagtgccttgaagtgtatgttagaaaaggaaatatcttcagataaaaactagaaagaagtttttcagacactgctatgtgatgtgtgcattcatctcacagagttaatactttcttttgattcagcaattcggaaagactgtttttgtagaatctgtgaaggcatatttgggagtgcattgagtcctacagagaaaaagaaatttctacagagaaaaagaaaatatctttagataaatctagaaagaactttttgagaaactgctttgtgatgggtgcattcatctcacagagttaaacctttcttctgattgagcagtttgaaaacactgcttttgtagaaactgtgaaagaatatttgggatgctttgaggcctatggtgaaagaggaaatgcctttagataaaaactagaaagaagctttctagttttctgatgtgtgcatcatctcacacactgatgtgtgcattcatctcactgagttaaagttctctagttttctgatgtgtgcattcatctcaccaagttaaagttttctttttattgagctgtttggaaaccccatttttgcagaatctgtgaagtgatatttgggaacgcaatgaggccaatgtcgaaaaagtaaatatcttcacataaaaactagaaagaatctttctgactaactcctttgtcatgtgtgaattcgtatcatacagataaagcttccttttgattgagcatcttggaaacactttgttgaatctgcacagggaaatttttgagcacattgaggcctatggtgaaaaagtatatatgttcagaaaaaaactagaaagaagctttctgagaaactgctttgtgatgtgtgcatttatctcacagagttaatcctttcttttaattgggcagtttggaaacactgtttttatagaatctgtcaagggatatatgagagtgcattgaggcctatggagaaaaaggaaatttcctcagataaaaactagcaagaagctttccaattaacagatttgtgatgtgtccattcatctcacagaatgcaacctttctattgattgagcatcttggaaaatctgtttttgtagaatctgtgaagggatatatgggagcatattgaagcctatggtgtaaaaggaaatatcttcatataaaaactagaaagacactttctgagaaactgctttgagatgtctgcattcgtctcccagagtttaagcattcgtttttgtagaatctgtgaagggatatttgggagcgcataggagcctatggtgggaagggaaatatcctgagataaaacccagaaaggtgttttgaaagaactgctttgtaatgtgtgcattcatctcccagagttaaattttgttttgattgactggttttggaacactattttgtagaatctgtgaagggatatttgggagtgcattgaggcctatggtgaaaaaggaaatatcttcagagaattctagaaagaagctttgtgagaaactgctttgtgatgggtgcattcatatcacagagttaatcctttctcctgattgaagcatttggaaacactgtttttgtagaatctgcaaagctagatttgggaatgcattgaggcctatggtgaaaaaggaaatatcctcagataaaaactagaaagatttctgagtaacatcgttgtgatgtgtgcattcctctaacagagttaaaccttcctttttattgagcagtttggaaacactgtttttgtagaatctgtgaagggatatttcagagcacgttgaggcctacggtgataaaggaaatatctttagataaaatgtagaagaagttctctgagaaacttatttgtgatgtgtatattcatctcagagagctaaaccttttctttgattgagcagtttggaaacactgttcttgtagaatctgtgaaggcacatttgggagcgcaatgaggcctacggtgataaaggagatatcttcagataaatactggaaagaagctttctgagaagctgctttgtgatgtgtgctttcatctcatagaggtaaacctttcttttgatttagtagtttagaaacactgtttttgtagaatccacaaaggggtatttgggaacacattgaggcttacggtgacaaggaaatatcctaagatgaaaactagaaagatttctgagaaacagctttgtgatgtgtacattcatctcacagagttaaagctttcttttgatagagcagtttggaaaccctatttttgtagaatctgcaaagtgatatttggtagtgcattgaggcctatggtaaaaaaatgaaatatcctacagtataaactggaaacatactttttgacaatttactttctgatgtgtgcattcatctcacagagttttacttttctttgattttcagtttggaaacactgtttttgtagactctgccaagggatatccttgtagatataggagagcattgaggtccagtgtgaaaaaggaaatgtctccacatgaaaaccagaaagatgatttctgagaaattgctttgtgatgtgtgcattcatcaaacggagttaaaccttccttttgattgagcatattggaaaccctgtttttgtaatatctgtgaagggatatttgggagtgctttgaggcctataatgtaaaaggaaatgtcttcatatgaaaattagaaggaaggtttctgagaaactactttgtgatgtctgcattcatctcactgagttaaacctttctttttattaagcagtttggaaacactctttttttataatctgtgaagggatactttggagtgaattaaggcctacggagaaaattgaaatatcttcacctaaaaaatagacagaagctttctgagaaactgctttgtgatgtccgcattcctctcacagagtttaagctttctttttattgagtagtttccaaacacagtttttgaaacatctctgaaaggatatttggaagcactttagggaacatggtgaaaaaggaaatatcttcagattaaaagtagaaagaagctttctgagatactgctttgtgatgtgtgcgttcatctcacagagttaaatgtttcatttgattgaacagcttggaaaccctttttttctaaaatatgtgaagggatatttgggagcgaattgaagcctatggtgaaaaaggaaatatcctcagataaatacttgaaagcagctttctgagaaactgctttttgatgtgctcattcttctcacagagttaatactttcttttgatagggcagtttggagacactgtttttgtagaaactgagaaaggatatttcaaattgcattgtagcatatggtgaaaaagcaaatatcttcagaataaactagaaagaagcactgtgagacactgctgtgtgatatgtgcattcccaaaactataaacatctgcttctctgggatagggatattgatgatgataaacctccttgactgcacgtgtgtttatcaggcctctgcagggggaagtacatcatgtgcttttggctcattcttgcaccccaacctggcattgtctttacaaaatcctgcatgcaattttgtatttacaataatcaggagcatttcatattttattctgcagcaatagtttcagggggtcctcctacccatttggaagccaataaaggtgtaggtgagaaactgaatatccccagataaaaactagaaagaatctatctggaaagtgctttgtgttgcatggattcatctcacagagcgaaacatttcttttcatgtagcagttttgaagcactctttaggtagaatcagtgaagaaacatttggggccatggaagcctataatgaaaaactgaatatacccagataaaaactagaatgaagctgcctgtgaaacttcttagtgatgtgtgaattcatctcacagacttaagcctttcttttcatacagcaggtttgaaacactcataggatagaatctgcaaagggacatttggaaacccatggaggcctatgttgaataactaaataaccccagataaaaactagaaataagccatgagaaactgcactgtgatgtgtggattcacctcacacagttaaacatttcttttgatttaggatgttaaaaacactcttctctaggatttttgaaggaaagttttggagcccattgaggcctatggggaaaaaatgaatattcccagataaaaactataaagaagctatctgtgaaactgctttgagttgtgtggattcatctcacagagttaaagatttttttaactcagcaggttggaaacactcattttgcaatatctgcgaagggacaacatcaaggcctatggtgaaaaacccaatatatttagataaaaactagaaagaagctatctgtgaaactgctttgtgatgtgtggattcttctcacagagttaaaactttcttttgatgcagttggttggaaacacttttttgttagaatctgtgaaggaacatttgcaaacccattgaggactatggtggaaaactgaatatcccaacataaaaattagaaagaaactgttagtgaaactactttgtgatgggtggattcacctcatagatgttaaccttccttttgattcagcaggttggaagcactctttttgtagaacctgcaaagggacatttgggagtccattgaggtctacattgaaaaaccaaatattagcagataaaaactagtaagaggttatatgtgaaacttcattgtgatgtgtggattcatctcacaaagttaaacatttcttttgattcagcagcttggaaacactctttttgtagaatttgcaatgggaaatttgggagccttttgaggcttatggtaataaaaaacgaatataaccagataaaaactaaaaagaagctatctgtgaaactcatttgtgatgtgtggatttaattcacagagtcaaacccttgttttcattcaacaagttggaaaacactctttttgtagaagctgcgaagtgacatttgagagcccatagactcctatggtgaataaccaaatatcttgaggttaaaaactagaaagatgctatctgtgaaactactttgtgatatgtggattcatctcacaaagttaaacctttcttctgattcagcaggttgcaatcactttttttgtaaaatcagcaaagagacatttggaagccctttgaggcctacagtaataaaccaaatatttctagaaaaaaaacaagagagaagttatctgtaaaactgttttgtgatgtgtgtattcatctcacagagttacacctttcttttgatactgcagtattgaaacactcttttgctagaatctgcgaatggacattttggaactcttagatgcctatggtgaataaccaaatatatccagataaaaatttcaaagaagctatctgtgaaacttctttgtgatgtggagattcatctcaaagagccaaacctttcttttttattcagcaggttggatatattattttggtagaatccatgaagggacacttcggagctcatggagtcttatgctgaaaatcagaatatccccagataaaaactagaaaaacatctgtctttgaaaatgctttggattcatctcacaaagataaacctttcttttgattcagcaggcgggaaatgctcttcggatagaattaccaagggaaaattgggagcacatagaggcctgtggtgaaaaactgaatatccccagataaaaactagaaagaagctatctgtgaaagtgctttgttatgtgtggattcatctcacaaagttatacctttctttttgattcaagagtttgcaaatacttcctttgcagaatctgcaaagggacatttgagatcctattgaggtgtatggtgagaaacagaatatcaacagatacaaactagaaagaagtgatccgtaaaactgctttgtaagatgtgttttcatcttacagtgttaaacatacgttttgattccagaggttggaaagatgctttaggtacaatctgcaaagggacatttgagagcccattgatgatgatggtttaaaaccaaatattccaagataaaactagaaaaaactatctgtgaaactgcattgggatgcatgcattcatctcacagagttaaagttctcctttgatttaggaggctggatacactttttcggtataatctgtgtagggaattttgggagccgtctcacacctgtcaagaaaaaacaaatatccccagataaaaactagacagaaactatctataaaacttaattttgatgtgtggattcatctcattgatttaaacctttcttttgattctgcagattgaaaaactcttttggaagaatctgcgaagggacatttggaagcccatagaagctgattgtgaaaaaacaaatattccaagatgaaaactagtaagaagctatatttgaaactgtattgtgatgtgtagatttatctcacagagttaaacttttctttggattcagcaggttggaaacacttgtttggtagaatctgtaaacggatatttgggagcctatagaggcctatgttgaaaaaccaagtatccataaataaaaactagaaggaagctacctgtgaaactgctttgtgatgtgtgtatccatctcactgagttaaaactgtcttttattcagtaggttgtaaaccctcttttggtagaatctgcaaagggacctatcacagcctgttgaggcctatggtgaaaaaacggatatccccagataaaaactagaaagaagctatttctgaaactgcattgtgatttgtgcatttatctcacagagttaaatgtttttattgattcagcaggatgaaaacactctttttgtagaatctgcaaagggacatttgggagttcttttaggcttatggtgaaaaactgaatacctccagaaaaaaaactagaaacaagctatctgtgaaattgatttgtgatgtgtgcattcacctcacagattttaatctttcttttcattcagtgagctgaaaacactctttttttagaatctgcaaagggacacatgggaacccataaaggcctatggtgaaaaattgaatatccccagataaaaagtaggaacaagctgtctgtgatactgcattgtgatgtgtgatttatctcacataggtaaatatttcttttgattcagcagattgcaaacactgttttagtagaatctgtggaggtacatttgggaacctattcaggcctatggtgaaaaacagtatacattcagaaaaaaacctgaaagaacatatctgtgaaactgatttttgatgtgtggattcatctcacagagataaacatttctttagatacagcagtgttgaaatattctttaaatagaatctgtgaagagacatttgtaagaccatggaggcctaagttgaaaaacagaatatcaccagataaaaactacaaagaaactatctgggacatttctttgtgatgtgtggtttcccccacagagttaaaccttctttcgatttagcacgttataaacactcttttactaggatctgtgaagggaaatttgtgagcccattttagcctatgttgaaaaactgaatatcccaagataaaaagataaaaaccagaaagaagctattagtgaaattgttttggatgtgtggattcatctcacagacttaaatctttcttttgtttaagcaggttttaaacacttttggtagaatctgtggagggacatttgggagcctattaagtcctatagtgaaaaaccgaatatccccagattaaaactagaaagaagccatctgtaaaactgctttcttatgtgtggattcatctcacagagttaaaactttctgtcaattcagcaggtttgaaataatctttttgtagaagctgtgaaaggacatttgggagccctttgtgaataaccaaatgtccccagataaaaactaggaagaagttattggtgaaaccgctttgagatgtgtggattcatctcaaagttacatttttcttttcccagcaggtgcaaaacaatttttggtagaatctgcgaagggacatttcagagcccataaagtcctatgatgaaaaacaaattatccccagataaaaactagaatcaagctatctgtgaaataactttgtgacatgtagattcatctcagagttaaacttattttttgattcagcaggtgggaaaaactcttttggtaggatttgcagagggacattttggagcccattgagacctatgttgtaaaacaaaatatccctagatataaactagaaagaagatctcatgaaacagcattgtgatttgtggattcatctgacacagttaaaaatttcttttgattcagcagtttggaaacactgttttggtagatcctgtgaagggacattttggagccctttgaggaatatggtaaaaaacataatttccccagatatattaagaggaagctaactgtgaaagtgctctgggatgtgcgtattcacccaagacttagacctttcttttgattcaggatgttggaaacactcttttggtagaatctgcaaagacatatttgggaacccattgaggcttataatgaaaaaatgaacattcaaagacaaaaactacaaagaagctatatgtgaaactgctttttgatgtatggattcatctcacagaattaaacctttgttttgattcagcaggttggaaacactattttggcataaattgccaaggtacatatgggagccctttgaagcctacagtgaagtgctgaatatctccagataaaaattcgaatgaagctatctgtaaaagtagtttctgacgtgtggattctttgcacagagttaaaagtttctttgattcagcaggttgcaaacactcctttgctagaatctgtgaagggacattccgagcccactgtagcctatggagaaaaatggaatatcccaggataaaaactagaaagaagctatatgttaaactgctttgtgttgtgtggattcatctctcagagttaaaggtatcttttgattacgtagcttgcaaacattccttttgtagaatctgtgaagggacatttggtagcactttgaggggtgtagtaaaaacagagtatccccagataaaaactagaaagcagctatagttataactgctttgtgatgtgtggattcatctcagagagttaaacctttttttgattcagcaatttgcatacaattcttttgtaggatctgtgaaggaatattttggagtccattttggcctatggtgaaagatcaaatatccccagataaaaactgaaagaagttaactgtgagactgctttgtgatatggggattcatgtcacagagttaaacatttgttttgactgagcaggttggaaatattcttttggaaaactctgttgagttacgttagggagccctttacagcttatggtgaaaaaccaaatgttcccagataaaaagttgaaagaagctatctgtgaaactgctttgtgaaagagtatgaaaacactcttttggtagaatctgtgaaaagacatttgaaagccgattgaggtatatggtgtaaaactgaatatccccagataaaaactagaaaagagcaatctgtgaaactgctttgtgaagggttgatgcatctcacagagttataccatttctttgattgggcaggttgcaaatacttcttatgtagaatctgcaagggacattcaggagcccattgaggcctatggtgaaaaacaaatctccccagataaaaactcgaaagaaggtatctgtgaaactacattgcgatgtgtggattcacctcacagagctaaaccattcttttgtttcagcaggttggaaacactcgttttgtagaatctgcaaagggacatttgtgagcccattgagccttatgatgaaaaactgaatatacccagataaaaactggaaagaagctatctgtgaaactgctttatgatgtgtggatttaattcacagtgttaaacctttcttttgatgcagcagcttgcaaatactcttttttgtagaatctgataagggacacttaggagccctttgaggactgtagtgaaaaactgaatatcttcacataaaaactagaaagagctatctgtgaaactgcttttttgatgagtggattcatctcacagtgttaaacctttcctttgattcagcaggttgaaagaactcgttttgtggaatctgcaaaaagatacgttgaggtcccctgtggcatacagtggaaaacacagtattcccagataaaaactggaaagaatttctttgtgaactgctttgtgatgtgtaaattcatctcacagagttaaacgtttcttcaatttaacatgtaggaaacactcttttggtagaatctgtgaagggacatttgggagcccattgaagcctatggtgaaagacagaatatcaccaggtatctgtgaactgctttgtgaggtctgaattcatctcaaagagctaaaacattccttaatacagcatgttggacacactctttttgtagaacctgcaaagggacatttgtaagccctttgaggcctatggtgaaaaattgaatgtgcacaaataaaaactagaaatgagctgtttgtgaaattgctttgtgatctgtgaattcatctcactgagttaaacctttcttttgatacagcaggattgaaaccctctttagttagaatctgcgaagggacatttgaaaacccatagaggcctatgttgaaaaacaaaatatccccagataaaaactataaataagctatctgtgatcctgctttgctatgtgtggaatcatctcagagagttaatcctctcttttgattcagcaggttgcaaacattcctttactagtatctgagaaaggacatttgtgaggccaatgtagcctactctgaaaaattgaatatccaaaggtgaaaacaagaaagaagctatcagtgaatatgctttgtgatgtgtggattcttctcatagagttaaacttttcttttgattcaaaagtttggaaatattcttttggtaaatcagggaagggatatgtgggacgccattaaggcttatggtaaaaaaaatattcccagataaacactagaaagaagctatctgtgaaactgcttcctgatgtgtggattcatctgacagtgttaaacttttcttttgattcagcaagttggaaaccctcttttggtacaatctgtgaagggacattttgaagccctttgaggcctatggtaagacatcgaatatccccagataataactacaaagaagctatctctgaaaattatttctgatgtcaggattcatctcacagagttaaacctttattttgattcaccaggttggaaacactcgttttgtgaaaactgcaaagggacatttcagtgcccacagaggtctatgcttaaaaaaaaaaaaaaaaaccaatatccctagataaaaactagaattaagctatctgtgaaactgctccgtaatgtgtggattcatctcacagaattaaacctttcttttgattcagcaggatggaaacactcttttggtacaatctgcaaagaaaaatttgggaaccctttgaggcctgtggtgaaaaaaaatcccagataaaaactagaaataaggtgtttgtgaaactgctgtgtgatatgtggattcatctcacagggttaaacctttgttttgactcaggagttgtgaaacactttttggtagaatctgcgaagggatattttgaagcccattgaggtctatggtgaaatacaaattatccccagattaaaaaaaaaaagaagaagctatctgtgaaactgatttgtgatgtgtggattcatctcacagtggtaaacctttcttttgattcagcatgttggagacacttctttgctagaatctgagaagggacatttttgagccccctgtaatatggtgaaaaatggaatatagcaaaataaaaactagaaagaagctgtctgtgaaacttctttatgatgtgtggattcatcccccaagggttatcttttctgttgatttagcaggatgccaacactccttttgtaaaatctgcaaaggaacatttgggggtccattgtggcttatgttgcaaaaccaaatatcccaagataaaaactagaaagaagctatctgtgaaactactttgtgatgtgtgaattcatcacatagagttgaaactttcttatgatagagcagtttgtgaacactttaggtagatagaatctgtgaaaagacatttgatagccaatagaggcctacactgaaaaacagaatatgcccagataaaaactagaaagatgatatctgtgaaaattatttgtgatgtgtggatttatcttacaaagttaaacctttcttttgattcagcaggtatgaaacgctattttggtagaatctgccgagggactcttgggagacaattgaggcttattgtgaaaatcagtatgttcccagatgaaaactacaaagaaggcatctgtgaaactgagttgtgatgtttggattcatctcacagatgaatccaatcctttgattcagcaggttggaaacaaacactctttggatagaatctgtgaaaggacatttgggatcctattgaggcctatggtaaataacctaatatccccagataaaaactagaaagaaactatcagtgaatcttctttgtgatgcatggattcatttcacagagttaaaactttcttttgattcagcaggctggaaacacctttttctagaatctgcgaaggggtatttgtgagacattttaggcgtataatgaaaaactgaaaatccacagaaaaaaccataaggaagctctttgtgaaactgtttgggatgtgtttattcatctaacatagttcaacctttctgtcaatatagcgtgtttgaaaaatgttttagatagcatctatgaagggatatttaagagcccatagaggcctatggtggaaaacagaatatccccagataaaaagtagaaaaaagctaagcatataactcccttctgttgtatggattcatctcacaaaattaaacctttgttatgacacagcatgtatgaaacactctttagttagtatcggtgaagggacatttacaagcccataagggtctatagttaaaaactcagtaactccagattaaaaactagaaagaagctatctgtttaacttacttgtaatgtcaggatttttcttaaagagataaacatttatattgaatcaacaagttggaatcactctttttgtagaatctgccaacagacattatgatcccttagaggcctattgtgaaaaactgaatataccttgataaaaactagaaagaagctatctttgaaactgtattgtaaagtgtggattcatctcacctggttaaacatttccctgaattcatcaggttggaaacgcatttttgtagactctgtgatgagacattgtggagcccattgagtcctatggtgaacaacccaatatttccagataaaaacctgaaggaaactatctgtgaaactgctttgtgatgtgcaattcatctaacagatttcaactttttttttattcagtaggttggagacactcatttgtagaatcagcaacaggatatttcagaacccattgaggcctatggatgaaaaccaaatatcccaagatcaaaactaaaaaggagctgtcagtgaaactgctttggatgttttgatttagctcacagaatcaaaactttgttttgattcatcaggctgtaaacagtcttttggtagaatctgcataggaacttatcacatcccattgaagcctaagcagaaataatggatatccccagataaaaactagaaagaagtgatttctgaaactgcattgtgatttgtgcatttatctcacaggattaaatctttctattcattcagcaggatggaaacacttgttgtagaatctgcaaagggacatttgggagcccttttaggcctatggtgaaaaaccgaatatccccagataaaaactataaagaagtgatcagtgaaactgcttttttgctgtgtgtatttatcttacagacttaaacctttcctttcattccacaggtttgaaacactcattttgcagaatctgtgaagggacattccggagcccctagaggcctattgtgaaaaagaaaatattcccagatgaaaactagaaagaagctatctgtgaagtgctctgtgatgtgtggagtcattgcacagagttaaacccttctattgatacagcaagatggaaacaatctttagatagaatctgcaaaggaacatttataagcccttagaggactatggtgaaaaacaggatatccccccataaaaactatcaagaagctatctgtgaaactgctttgttaagtgtggaatcagctcaaaggcttaaaactttcttttgaatctgcaagttgcaaacattcttttgctggaatctgtgaaggaacatttgcaagcccattgtagcacactgtgaaaaatggcatattcaaagataaaaactagaaagaagattttagtgaaactactttgtgatgtgcagattctactcacagagtttaacttttctattgattcagcaggttggaaacactcttttagtagaatcaggaaagggatatgtgggagctctttgagacctaaggtgaaaaattgaatattcccagataaaaatagaaagatgttatttgtgaaactgctatatgatgtgtggattcatatcacagagttaaaccttgtgtgggctggtagagtctcctattagaatatctggggttgccctgttgtctttatcattagactgcttggggtcagccaggagtctctcccactagaatgcatagggttgccaaggtatctctatcattacacttcctggggtcagacaggagtttcttcctttagaatccctgcaaacccccacttttctcatcgttagacttccaggggttggctgagagtctctcccactaggatgcctaaagtcaaccaggtataccaaccttagactgcctagggtcagccaggagactcttccactagaatgcatgggtttgctaaggtgtctccatcattacattgcctggtgttggcaagaagtctctcccattaaaataccaaaggccagccaagagtctctcccattagaatgcctagagtcacccagttgtctctatcagtagaatgcctgagttcagctgtgaatctctttcattaaaatgcctgagatcgtccagctgtctctaacattacgctgcttatagtcggctgggagtctctccctttagaatacctggggtcagccaggtgtctgtatcattagactgcctggggttggtgagaatctctcccattaaagtgcctgagatcacccaagtgtctttatcattacactctctgcagttggccagcagtctctcccataagaatgccacaggccacccacgtgattctaacattagactatctggggtcggccaggagtctctcccattggaatgcatgtggtcacccaggtgtctctatcattagactgcctgaagtcggccaaaggacttttccattataatgtctggggtcacccaagtatctctctaattaaactgcctgtggtcagaaagaagtctctcccattaaaatccctggggtcacccaggtttctctctccttaggctgcctagggtgggacaggagtctctgcattagaatgcctggggttggtggggagcctctcccattagaatgcctacagtcgcccagttgtctctatcattagactgcctggggtcgcctgaaactctctcccattagaaagtctgggtgcgggccgggcgcggtggctcacgcctgtaatcccagcactttgggaggccgaggtgggcggatcacgaggtcaggagatcgagaccatcccagctaacacggtgaaaccccgtctctactaaaaatacaaaaaattagccgggcgtagtggcgggcgcctgtagtcccagctacttgggaggctgaggcgggagaatggcgtgaacccgggaggcggagcttgcagtgagccgagatcccgccactgcactccagcctgggcgacagagcgagactccgtctcaaaaaaaaaaaaaaaaaaaaaaaaaaaaaaaaaagaaagtctgggtgcgtgcaggtgtctttattgtaagactgcctggggttgaccaggagtctctcctattagaatgcctgggattgttcagatgtctctatcattagaatgcctggggccagcaagcagtctttcctgttagaatgcctgtggtggcccaactgtctctattattagactgactgaggtcagccaggagtctctccaaaaagaatgcctggggtcatcagggagtcttcctcattagaatgactttggtctcacatatttctctaccatcagactccctaagagtggctgggaatctctttcatcagaatgcctgggacacccaggtgtctttatagttagactgcatagggtaagcaaaaactctctcccattagaatgcctggtttcttctgagagtctctcccattagaatgactgtggtgacccaggtttctctataattaaactgcctggggtcggccaggagtctttcccattacaatgcctggggtctccaaggtgtctttattatttgactgactgtgctaggctgggagtctctcccatatgaatgcctgtggtggccaagttgtctctatagttagaccacctaaggtcaaacaaaagtctctcattagcatgccaggagtcacagaggtgtctatcattagactgcctggggttggctgggagtttttctcattagaatgctgaaggtcgcccaggtgtttctgtcattaggctacctggggttggccaggattttctctcattggaatgcctggagggtcgcccaggtgtctctatcattaaactgcatagggtcagcaaggagtctttcccattagaatgcctggggtcagccaagtgttttcattcttagactgcctggtgttggctaaaaggctatcccattagaatgcctggggtcccccgggagtccctcccatcagaatgcctggagccacccaggtgtgtctgtcattaaactgcctgggtttggcccggtgtctctcacattagaatgcttgggtttgcacaggtgtctcgatatttagactgcctgggctcagccaggagtctctccaattagaatatctgggtttgtccagagtctatcccattagaatgactgggatctcccaggtctctataattagacttcctgagtcagccaggagtttctcccattagaatgcctagaattgacgaggtgtctctaacattagactgcctggggttggctgggtgtctctcccattagaattcttgaggttggctggatgttactatttttagaatgcctgaggtcgcccaggtgactctattattaaaatccccaggttcggatggaagtctctcccattagcatgcccagggtcactcaggtgtctctaccatgagacttcttggggttggctgggagtgcctcccattataatgcctggggtcgcccaggtgtctctataattagagtgcctggagtcagccaggagtctctcccattaaaatgccttgggttgcccaggtgtctctattattagactgccaggggtccgacaggagttactcctgtaagtttgcctgtgatcgcttgggtatctctataattagactgcctgagaacagccaggagtctctctctccaattaaattgcctggagtcaagtgggagtccttcccattagaatgcctgtggttgcccaggtgtctctgtcattagacagcctgtagtcagccgagagtctctcccatcagaatgcctaagttcacctaggtgtctttattattacactgcattgggtcagccaagagtctctcctactagaaagcctggaatctgccaagagtctgtcccattagaatgcctgggttggtaaaggtgtctctattatataatgtctgggattggccgggagtctctcttattacaatgtctggggtcaaccaagtatctctataattacactacctggggtcgaccaggagactctcccattaaaatgcctggggtcacttaattttctctataatttgattgcctggggtcagccaggagactcttccaagaaaatgccagaggttggctgggagtctcttttattagaatgactggggtccaccaggtgtctctattattatgcaacctggggctggtcaggagcctttttcattaaaataccttgtaggggtgggttgcccctacacacctgtgggtgtttctcgtaaggtgggacgagagatttggaaaagaaaaagacacagagacaaagtatagagaaagaaataaggggacccggggaaccagcgttcagcatatggaggatcccgccagcctctgagttcccttagtatttattcatcatttgtgggtgtttctcgaagagggggatgtgtcagggtcacaagacaattgtggggagagggtcagcagacaaacacgtgaacaaaggtctttgcatcatagacaatgtaaaggattaagtgctgtgcttttagatatgcatacacataaacatctcaatgctttacaaagcagtattgctgcccgcaggtcccacctccagccctaaggcggtttttccctatctcagtagatggagcatacaatcggattttatacctagacattccattgcccagggacaggcaggagacagatgccttcctcttgtctcaactgcaagaggcattccttcctcttttactaatcctcctcagcacagaccctttacgggtgtcgggctgggggacggtcaggtctttcccttcccacgaggccatatttcagactatcacatggggagaaaccttggacaatacctggctttcctaggcagaggtccctgcggccttccccagtttttgtgtccctgggtacttgagattagggagtggtgatgactcttaaggagcatgctgccttcaagcatctgtttaacaaagcacatcttgcaccgcccttaatccatttaactctgagttgacacagcacatgtttcagagagcacggggttgggggtaaggtcacagattaacagaatctcaaggcagaagaatttttcttagtacataacgcagaagaatttttcttagtacataacaaaatggagtctcctatgtctacttctttctacacagacacagtaacaatctgatctctcttgcttttccccacatttcccccttttcttttcgacaaaaccgccatcgtcatcatggcccgttctcgatggtcgctgtctcttcggagctgttgggtacacctgcagactaacaacagacaaaacaggcacacaaggattaatatgagatttataatcgtagtacttccaatggtcttaacccaagtgacagggttaagatttgcgaggccatcagcaactcctgcaattgcctcagttcctggcaccaaatttaaatgggcttttgatgcttcgaaaatttgttcttttaatttggaaatgtctaaagtgagattatcttctcttccctgtagatggcgtctaaccatgtcccagtgatgctcagactcattataaatttggggtgtaatagaaaaatctgacgtattccagtcacattgtaactggaaacgatgttctaagctcatgagcctgtctcccatccaaatgacagtttgtctaagatcattaatttgatttgccaatttttgatcaatactagattgtgaattccacaatcttgtagaatttttttgccaatcattaacaaagtttactgactgaacagaagagtgcaatgcaactcctgctacagcagccgtagctgtgactgcaattaatcccataatcactgctattaaagtaaaaatgaatcttttggatctatttaaaacaccttttaatacttcagtcaaagtatggatggatggtgaggcctcccacggtcggtccatggacacagggatccacacgccctctcttgctctcaccagcagaatacggtgttgccaattaaaagttgaatcaatgcaagtaagcaatctacaattttcacaggttatagtctgggagtctggtttaataactatatttcctacaactagcatataagggggctttatgcaactttgtaaaggaactgttagactggaatttaggtcgacagtataaaatggcttacgatctcttgtttctaaagtttgatttccagaccaaattctaatgtggtgtgaggccacagtaagcctccataattctggatgttcaggaccagaaacaggacttattatttttggtcttggggtagagattcctttttctccccattcccaagggtagaaagactgcaattttttatgcttatgtttgtctaaactttctgttaagtcgctatcaacagctggactcacttgtgcacttggacacgactgagtttgtcctgagcaattgtggtagaattgacctcgaggtgcccaatctataatagttccaaattcattgttttgtaatatcaccgcactattggccacacattcttcccaaactaaaacttctgtattttttgattctttgggaatttccttggggcaaggtttccctttaggtctaaatttaaatgatctttgataagaaaagtcttgtaaataatttacccgtggcctgagtgacatcccgcttaccatgtgataagtgaatctactgatgggactgacagtaggtacttctaccaaccaattttggactgcaggcattaaacatcctggtgctctccctaggcaaataggaggataacgatacccaatggaaatatttatcatcatcccttcttcctcaggtttggcagggcagtgatcatctgtggggccaggtacccatacactatcattaacatatacttctataggattatccatccatgtgactgcccgaattaagggcgggaaaggcacataggcccagtaggtatagttagctgcagctgctcctgcaggcatagggagacttaccaccattgatacaatcatcaaggctgcaagcagcatactctctggggtttgtgtcacctttgtgttctctagatattttgtagctaactgcgtcagcttctttagttgtgcccaagtcggcggctctgctttcttggtggatggcaacttcatctgttcttctgacgtcaccattttgttcatcttgtgagtcaacggtgctcgattgcggtgtctccgtctccgcggaggtgcttttctttgcatctccgatgggttcattgtagaacttcaaatgtctagtgggtatccaaacaggaagctgattttctcctggtgaaacacaagcaaaacctctcccccacgttatcaccttccctatttcccatgtcttatttttattatctttccaccaaattagttttccttcatgtgggctgttctttttaccagtaagatgttgttctgcagaagtagtagtctgatttctataaatgtttaaaaaatttaaagtatagagtgctagattaagttgcatctgaggagtggtacactccttactgtctcccccttctttttgtttaactaattgagttttgagtgttctatttgttctttcaactatggcctgtccttgggaattataaggaattcctgttgtatgtgaaattttccactgacttaagaatttttggaaagctttactacaatatcctggtccattgtcagttttgattttttctggaactcccattacagcaaaacaagacaataaatgttttttaacatgggaagtactttctcctgtttggcaagttgcccatatgaaatgtgaataagtatcaactgttacatgaatatatgataatcttccaaatgaagatacatgcgtgacatccatttgccataatgcattaggacacagacctctgggattaactcctgcctcttgagtgggcaggtgtaagacttgacactgggtgcaatgttgtacaatatcttttgcctgtttccatgtgacatcaaatttgttttttaatcctgctacatttacatgagtcaaagcatgaagttcttgtgcttttatgagtgcagatgataccagtaagtcagcttgttcatttgctttagtcaaaggccctggtaaattagtgtgtgctcgaatatgagtaatataaaatggaaaatttctttttcttttttttttttttttttttttttttgagacggagtctcgctctgtcgcccaggctggagtgcagtggcgggatctcggctcactgcaagctccgcctcccgggttcacgccattctcctgcctcagcctcccgagtagctgggactacaggcgcccgccactacgcccggctaattttttgtatttttagtagagacggggtttcaccgttttagccgggatggtctcgatctcctgacctcgtgatccgcccgcctcggcctcccaaagtgctgggattacaggcgtgagccaccgcgcccggccggaaaatttctttttcttacagtttgttgtaataaattgaatagctggtttaactgatcatccatgctatatttaattagagctgtctcaacatcccttgtagcttgtactacatatgcagaatctgatataatattgataggttggtcaaaatcttgcaacactgtaatgactgcaaccaattctgctctttgagccgattgatattgagttttgattactcgttctttcggccctgtgtaagctgcttttccattgctggaaccatcagtaaatactgttagagcattttctaaaggttcacgtctggtaattttaggtagaatccaagtagtcatttttaagaactggaagatctttgtttttgggtaatgattatcaataattcccacaaaattagcaagaccaatctgccatgcaccagaattgataaaggcttgtctaacttgttccttggttaaagggacaactattttgtctgggtcatttccacataattttattattcgtaatcttgtctgaccaattaatgtagccatttgatccaagtacaatgtaaaagtcttaactgtactgtgaggaaggaatgaccactccacaagatcagtattttgaataatgatgcctgttggagaatgtgcagtggcaaaaatcaaaagttggagtgtggctaagggatctattctatttatttgcgctgactgaattttttcttccactaatttaatttcttttgttgcctctggggttaacattcttttactatttaagtctgagtctcctcttaagatagagaacaaatttgacatggcataagtaggaatgcctagagttggccgaatccaattaatatctcccagcaatttttgaaaatcatttagtgtttttaatgtgtcttttcttatttctatttttggtggcttaatttttctattttctatctgcatccctaaataatgaaaaggagtagaggtttggatcttatcagatgctattgccagtcctgcgttggcaacctctgcttgcagaaatgtataacagtcaattaatttatctttcgtttctgcagcacataaaatatcatcaatataatgaatgatataacagtctgaaaacttttctctaactggttgaagagctcgacctacaaaagtctgacaaatagttggactattaagcattccctgaggtaacactttccactgaaacctggtggctggctctttattatttatggctggtatagtaaaggcaaatttttcacaatcctgctctgccagagggatggtaaaaaagcaatcctttagatcaattataattaaaggccaatcttttgggatcatggccagagagggcaacccgggttggagaggccccatgggttgaattacggcgtttacggcatttacggcccttaagtcagttaacatacgccatttgcctgatttcttctgaattacaaacacaggagaattccaaggtgagaatgaaggctcaatatgacccttttctaactgttcatttgctaataaatgtaaagcctccagtttttgttttggtagcggccactgatttacccacactggtttttctgttttccaagttaatggtatgggtttaggaggctctacagtggccacccctaaaaaggataccctattccttctcttttttgatttattttagcctcaactggaattttaatgccatcttcatttttccctagtccctttcctggtatatatcccatcttggtcatgattttttgactcgtggggctatataatggagcaggcatggtgatttccgcaccccattgttgtaataaatctcgaccccacagattaagaggaattgaagtaatcattggctgaacagtactttcttgattatctggccctaagcaatgtaaaatctcagtactttgatacacttctgaggctgtgcctatgccgacaagtcctgtaacagccttttgtttaggccaattttttggccactgatttaaagcaatgatagagacatctgctccagtgtctaccaacccttcaaactgttttccttgaataatggccttacacacaggtctgttctctgagacctgacttgcccaatatgcagcctttcctgttggatcagtgcttccaagccctcctattctttttatttcactatttccaccctttaatatatggcaggagtaataattgagcaatcctgtctcctggactggcactccaaggaattgaagagctaataaccaactgaatttcgcctttatagcctgaatcaaccacaccagtatgaatttgaactccttttagatttagacttgatcttcccaagattagtcctacagtcccctcaggcagggggccatatacccctgtggggattttttgtgggggctcccctggaagcagagagactgcttgtatagtacataaatctactgctgcactgccgcttgtggcgggggacaattgttgtattgtggtaactggcttattccctgaaacacttgggacagtgggggttgttgtccctgaaaaccatgaggaacaaatggctgaattgggaatgccccagtttgttgtggggcctgaggctggcccctttgctcgtttcccgacaatggttgcccatttttatcaaatttagaacgacattgactagcccaatgttttccttttttacatcttggacataagtcaggtggctctctacctgttgtagttgcttgaatagttatattctgtttgtttaagactgggcaattcttttttaagtgaccaatttgaccacaattgtaacattttcctccaaatgttctgacttgtcctcctaaaacaactcctgttattgcttgagccataagcatagctttatgcatagctcctcccattccatcacaggcttttacatattctgagattacatctgatcctgcaggaacctttccttttaatggcttaatggctgattgacactcaggattggggttttcatatgccatcaactccactatgaccttacgggctttttcaatggcaattgacttttgagcaacatcttggagccttgccacaaaatcaggatagggctcttttgaaccttgtcttactgtattaaatgaggggcaggtacttcctgggtcttggattttttcccaggctctaaggcagatagctctaacttgctcaatggcctcattttgcattaatgcttgttgactaatagtactccaattttgacctattcctaatagttgatctgcatctatgttaactggaggattggcagccctatttcttcggacctgttcttgtaccccatcaatccaccaagtcttaaattgtaaaaattgagagggtgagagagacgattttgccagaatctcccaatcataaggaatgagtctatgtccatgagcaatggaatctaataatgtcctcatataaggggagttgggtccatactgttttactccctctttcatatcttttagcatttttatcgaaaaagacttgtatctggcctcaactgtgggaggctctccctcttgggctccttctccaggtggcatcggttctaacgttactgggaattgccatgcctcagtatctccttcctttcttgatttatcaataatttcatgtaattcactaccccgtctactaggtggtgccgtaggattaagtctcctagtgggcggctgagggtatggcgccctgccctgtggtgctgggggcattcctggatatccatactgactttctaggggtggccgatactgaagttcagccggcggccagtattgataggctactggcggttgggtcttattttctttaacctgcgtttgaggttgtaatgttacgggcacctgacctgctggaagacgacttgtgcctcgtggtttagactctgatggccccactaattctggaacttttccttctaattttaacgtttcaggatatatcacctcctgtaattgattatagtcaacattttgcgttgactgagccattaccggctctgctacatattcgcaatgtaaactttccgtttctttctgggattttttccttgtgttttcattacaatctattatacagcttccaggggcatcagaaactgaaacgctatcttcttctgtttgaaatggttctaaagctgctttaataatggcccaatcattccatactgtaagtggaatgatattacccttcctacctgcttgttttagttccttaccaattcttttccaatcttttagatctaaagttccttgttctggaaaccatgggcaaaattgttctattatttgaaatagcttgattagattttttgtagatactttaactccccctctttttagaagaattttaataaagctgagataagaggcatatttacttttaattttacttttagtttgccccattatcaccctagcttcttctgagcgcacaagcttactgtaaggctgactgtagacgtactcaggatctctcgtcgacttgtcctcaatgaccacgctcgagcgtaccttcaccctagagaaaagcctccacgttgggcaccagatgtaggggtgggttgcccctacaatacctgattttgtccgaaaatctattccattagaatgactagggtcacccaggtgtttctataattagactgtctgggtctgccagtagtttctcccattaaaatgcctagggtcgcccaggtgtttctataattagactgtctgggtccaccagtagtttctcccattataatgcctagggtcaacaaggtgtctctataattagacttcctggggtcagccaggagtctcccataaaaatgcctagggttgcccaggtgtttctatcattagactgcctggcatcagccagaagtctctccaattaaaatgcttgggtcactcaggtgtatctatcactagactgcctggggtcaggtgggagtttctcccgttggaatgctcggggatgaaaaggtgtctctatcattagactgcctgaggtcaaccaggagtctctcccattcaaatgcctgcatttgcccaggagtccctattcttagactgcctggggttggccaggagactctccaattagaatacctggattcctctgggagtctttcctattagaatgactgtggtggctcaggtgtctctataattacactaccttgggttggccaggagtctctccattaaaatgcctggggtcgaccatgtgtctctatcattagactacctgaggtcagccagaagtctctcccattggattgcctggggtcggataagagtctcattttttaagaatttctggggtcaccaagttgcctctatcattaaaatgcctggggtctactgggagtttctcccattagaatgtcagtggtcgcaaaggggtctctgaaattagactgtctgcagttggtcaagagtctctcccattagaatgacagtggtcttcaggtgtctctataattagaatgcctggagtcagccaggattctctgtcagtacaatgcctgggatctctcaggtgtctctataaatagaccacctgggttcggacaaaagtctctcccattagaatgccaagggtctccaaggtgtctctattattagacttccaggggtgggctgggagcctcttccattagaattctggggatcacctaggtgtttctgtcattagactacctggggtcagccaagagtctctcccattgaaatggctggggtcgcccaggtatatttatcactagactgcctggggttggccaggagcctctaccatggaaatgcctgggagtctttcccattgaaatgcctgggttggcctaattgtctttatcattaggcttcctcacttcggacagatgactctccaattagcatggctgcagtcgcccaggagtctctcccattagaatgcctggggtcagctgaaagtctcttccattagaatgtctggactctcctaggtgtctctacctttaaaatgcttgggtttagacaaaagtctctcccattaaaatgccatggctcttgaagctgtctctatcattagaaagtattgggtcagacagcagactctccgattagaaatcctagtgtcactcagatgtctctataatgagactgccctgggttggccaggagactctaccattataatacgtggggtggcccaagtgtccctataattagactgcctgtggtcaacaagttgtctctcacattagaatgcctggtctcgcccaggtgtcttcattcttagactgtcttgggtcagccaggcgcctctcccactagaatgcctggggtctgcccaaagtctctcccattagaatgcctggggtctgcccaaagtctctcccattagaatgcctggagtcacccaggtgtctctatcattagactggatggggttgggccagagtctctcccgttagaatgtctggggtcgctgaggtgtctctataattagactgcctggataaggtcaaagtctctccctttagaatatctgttgtcgcccagatgtctctatccttagactgccttggataggccagaagtctcttctattagaatgcctatggtcatcggggattctcttccattataatgactggggtcgtctaggtgtcttttttattagactgcctggggttgcccaggtgtctctaataatgaaactgcctggggccaaacaggagtctctctaatctgaatacctggaatcaaccaggtgtctctatcattagactgcattgtgtcagctgggagtctctccctttagaatgctggaggtcacccaggtgtttctgtaattagactacctaatctgcccaatggaatgtctgatgtttcccatgtgtctctatcattagactgccttgggtcggccaggagcttctcttattagaatgtctggggtcacccaggtgtctctataattagaatgcttggggtcagcaaggccctgttgaatatctggggtgggtcagttgtctccatccttagacttcctggggttagcctggagtctttcattagaatgctcggggtcagcctagattatctcctattagaatgcctggagttgcccaggtttctctatcattagactgcctggggttggccgagagtctctctcattagaatgcctggggcctactgagaatctctccctttagaatgcccaaggtcacctaaatgtctgtatcactaggctgtctggggtctgccaattgtctctccaattagaatgtctgtggtcgaccatgtgtctctatcattagactgactggtgttggccaagagtctcccattagaataccttcagttggccgtgagtctcttccattagaatgccttgggtagtccagagtctttcgtattaaaatgcttggggtttccttcttgtctctatcattagactctctcggattggacaggaaactctcccattagaaagtctgtgggctcccaggtgtctctatcattcgatgtcctgggaatgtccaagagtctctcccattagaatgcccgaagttggccggaagtctctcccgttagaatgcctgcagtcacccaggtgtctctatcaatcattagaatgcttggggttggctgggagtctctcccattaaaatgccttgggtggttcaggtgtctctatcattaaaatgaatggggtcggctggcagtgtctcccattagaacacctgatgtcaccaaggtgtctctataaagactggttttgctcggccaggtgtccttattcttagactgcctgtggtcagccagaagtctctttcattagaatgcgtggggtcaaccaaaaatctctccattataaagactgtggatgcccaattctctctataattagactgcctggggtcaaccaggagtctctcctattaaaacgcctgtggcaaaccaggtgtcttcatcattagactgcctggtgtcagcgaggagtctctgccattagaatgcttgtggtcagttgagagtcttttctgttagaatccctgggctctccaatgtgtctctgttattagaaagcctggggccatccgggagtctctccaattagaatgcctggagttgcccaggtgtctctattattagactgccagaagtcagccagaaatctctcccattagaatgcttggggtcgcccagtaggctttatttttagaatgcccatggtggggcaagagccccttccatgaaaatggctggtgtctcccaggtgtctccatcattagagtgcctgcggtcggctgaaattctctcccgttagaatccctgagatcactcaggtgtctttatcgttagactgcctgcggttggccgggagtgttttccagtagaatgtctggtgtcaaccaggagtcttactctttagattgcctgaggtcggccaggagtttcttcattagaattcctggggtcggctgaaagtctctcttattagaatgactggggttgtccaggtgtctgtatcattatagtgtcgtgggtcacccagagtgtgtcctattagaatgcctggggtcacctaggtgtctttataattagactgcttgggctcagtcagtgatctctcccattagaatgcctggtgtggcacaggtttctctattattagactgcatgcagtctgctgggagcctctcccattagaatgcctggagtcatccagggctctctagcattagacttgctgcggtcggccggaagtctccacattagaatgcttggggtcggagggagtatctcccattagaataattggtgtcgtccaggtgtctctaatattagaatgcctggagtaggccaggagtctttcactttagaatgcctaatgtcgtgaagtttctctataattagactggggtcagccaggagtctctcccaaaggaatacctggtgtctgctgaaaatttctcccattaaaatgccatcaaaatgcttgtggtcagttggaagttttttctattagaatgcctgtcatctccaaggtgtctctattattagaaagccaggggctagctgggagtctcttcaattagaatgcctggagtcatccatttgtctctatcattagaattcctgaagtcatccaggagtctctcccattacaatgacatgggtcggccaaatgtttccatcattagaatgcctgccattggccttgagtctctcccattagaatgcctgggatcacccagatgtctctatcattagactgccttggatcagccaggagtctctcccattataatgcctgggtttacttaaatgtctctataattaggctgccaggctcttccatgagtctctcccattaaaatgtctggagtcgcccaggtgtctccatctctaggctgcctggaattggccaggagtctctcccagtagaatacctggggttgtccaggtttctctatcactagtctgcctgggttcgactgggagtctcttccattagaatgcctggggttgctcaggtagctctttcattagactgcttgaggtcatccagaagtctctcccattaaaattcctaaaatcgcccaggtgtctccataattagactgccagggattggttaggagtctctcccattagaatgcctgtggtcgcccaggtgtctgtatactttgactgcctgctgttgtccaggagtctctcattagaatgcttgaggtcgtccccgagttcctcccattagaatgcctggggtcacccaggtgcctctaccattagaccacctgggttccatcggatatctctcccattacaactcctgaagttgcccaagtgtctttattattatactgccagggtttggccagaagtctccttcattagaatgcctggggatgcccaggagcctctaaccttaaattgccaggggttggcctaaatccctcccaagagaatgcttggggtcggccaaaaacctcttcaattagaatgctgtttgttgcccaggtggcccatcattagaaagcctgtgttcagctgagagtctcgcccattagaatgcctggggtaatttagatgtctgtataattagactgcctggagtcagccaggaataatacctgcatttgactgggagtctttcccattagaatgcctatggttgctcatgtttctctatcattagaatgtctgggttcggccaggagactctcccattagaatgtctgtagccacccaggtgtctctatcatttaactgcctggcatcaactgggagtctctacattagaatgccttgggtcgaccaggtgtctctattgtttgactgcctggtgtcagccaaaagcctctccattagaatgcatgggtctggccaagaatccctaccattagaattactgggattgtccgggtgtctgtatcattagactgtctggggtcggctgggaatctctcccattaaaatgcctagggtagcccaggtgtctctatcattggaatgtctggggctggccgggtgtatttcccattagaatgactgggattctccaggtgtctctatcattagactgcctgaggtcggccgggagtctctccaattagaatgactggagtcgcccaggggtctctatcactgggctgcctggggtcggccaggagtttctcccattagaatgctttgggctgactgggagtctctcccattagaacatgtagggttgcccaggtgcctctaacattagactgcctggagtcggctaggaatctctctcattagaatacctggggtcgcctaggtgtctctttaattattctaccaggaatccaccaggagtctctcgcatgagaatccctgttgttgcccatttgcctccatcattggacagcctggggtcagctgagagtctctctcattaaaatgcctggggttgcctaggtgtctctaacattagactgcctgtgttcatccaaaacttctcccgttagaatgcctgaagatgccaatgtgtgtctataattacaataccttgggtctgccaggagcttctcccattagaatgccagaggtcgcccaggtgtctattcttagacagcctgcattcagccaggagtctctcattagaatgcctggtgttggcagaaattatctttcattagaatgcctggggtcacccaggtgtctctattattaggctgtctgagtttggcagtgagtctctttcattacaatgcctgaggtcgcccaggtgtctctatcattagactgcttagggttggccaggaatctctcccattcgaattcctagtgttgcccaggtgtctgtaattagacttcctgggttcaaccaggagactctcccattacaatgcctggggttgctcaggtgtgtctatcattagactgcttagggttggctagcaattctctcccattcgaattcctagtgttgcctagatgtctctataattagactccctgggttcaaccaggtgtctctcccattagaatgcctagggtcgctcaggtgtctctatctttaaactgcctagggtcagccaggagtctcccattagaatacctggggtcgccaaggtgtctctattattagaatgactggagtcagtggggactttcacctccattagaatgcctaaggtcatctagatgtctctataattagactttctgtggtcagccaaacctctcttccaaaagaatgcctgcattcttccagaagtctctcccattagaatgcctgaagctgctcatgtctgtctgtaagtagactgcctgggtcagtcaggagtctctcccattagaatgcctgaggaccccaagctgtcactatcatgagactgcatggtgtagcccaggtgtctttatcattaaacttcctggggccagccaggagtctatttcattagaatgcctgcagtagcccaggtgtctctattgtgagacttcctagggtaggaagggagtctctcccattaaaatgcctggcgtctcccaggtgtctctacaattagtctgcctggggtcagccagtatcctctaccattagaatgcctggtgtctcccaggtgtctctataattatattgtctgagtaagctaagattctctcccatttaaattcatggggtcacccaggtttaattattcttagactgcccagtgtcagccaagagtctctggtattaggatgactgatgtcgccctggtgtctctataattacctgggtttggccaagagtctctctcattaaaatgcctaaaatcgaccaggtgtttttatcattagactgcctgcggtcggccaggggtctctcccattagaatgcctggcgtcggccaggagtcttttggattagaattactggggtggcccaggtgtctttattataatgcctagggtcttctgggagtctctcccattagaatgcatgctgtcgcccatgcgtctctatcattagactcactggggtcggctgggagtctcttttattagaatgcttggagtgggctggaagtctttcccattagaattcctgtggttggcagggagtctttcccattagaattcctgtggttggcagggagtctttcccattataattcctgggatcaaccagttgtctttatcattagaatgcctgggataggccaggagtctctcccagtagaactcctactgtcacccaggtgtctctaccattagaatgcctagggtcagccaggagtctttccaattagaattactaaaatcgcccaggggtctttattattagacagcctgggttcggctgggagtctctcccattagaatgactggcattgcccaagtgtttctatcattagactgtctaggtttggccaggagtcattcacattagaatacctgtggtcgcccagttgtctctacaattagaatgcctaggttcttccaggagtctctcccatttgaatgccttgggtcacccaagtgtttctatcattagactgccttagttctgccagaaatctcttattttagaatgcctgtggtcgacctcgagtctctcccattagaatgacttgggttgcctaggggtctctatcattgaactgcctagcatctcctgtgtgcctcttctattagaatgcctgtgtcaccctgttgttcctatctttagactgcctggggtcagacgggaatctctcccattagaaagccaggagttgcccagttgtctctatcattagactgccttgtgttatccaggagtctctcctactaaaatgcctggtgtcacccaggtgtcttcattattagactacagggtgttggccaagagttgctaccattagaatgcctggggtgggccaggagtttctcccatttgaatgcctgaggtcgtttagctgtctctgttattagactgcctggaatcgacgggaatatcttctatcagaatgcctggagatgcccaggtgtctctcttgttagactgcctgtggtcagccaggtgtctctcccatgagaatgccaggaatcgccaagttgtctctatcattagactgcttggagtcagccaggagtctctcccattagaatgccttgtgtcacccaggtgtctatctttagaatgcctgaggtcagccaggagtctctcccattagaatgcctggggtcacccaggtgtttccatcattagactgcctgtggttggctgtaaatctctatcattagaatgcctggggtcacccaggtggttctattatactgctctgggtccaccaggagtctcttccattataatgcctgggctttttcaggtgtacctataattaggcttcctgggcttgaccagaagtctctccatagaatgcctggggtcgcccagttgtctctatcattagcctgcctgtattcggctgggagcctttctaattagaatgcctggggtcgcccaggtttctctattattagaatgactgtaataaccccgtgtgtctataattagaccctcaggggtcggccaggagtctctcccattagaatgcctgtggccactcaggtgtctttatcctaacattgtctgtggtcagccacaagtctcccattaaaatgcctggggttcaccgggagtctctccgattagaatgcctggggtggatattgtgtctctatcattagactgcctgggttcaactgggtgggtctctctttaatttgcctgaggtccttaaagtgtctctatcattagattgcctggggtcacctgggagtctctcccattagaatgcctgtggtcgaccaggtgtctttattcttagacggcctggggtcgaccacgagtctttcccattagaatgactggagtcatccagaattctctcccattagaatgactgtaatcgcctggtgtctctataattaaactgcctggcattggccaggattgtcttcctttaaaatgcctggttgtgaccaggtgtctctatcattagactgcttgggcttaaccaggagtctctcctattagaatgtcttacatcacccaggtgtttctataattaattgcctggggttggccaagtatttccttcattagaatgcctgctgtcacccagatgtctctgtcaattggccctgtggggtcagccgagagtctttttcagtataatgctttgggtcacacaggtgcctctctcattagactgcctggggttgtccaggtgtctctcaaattagaatgtctgggatctcccaggtgtctctatcattagacttcctgaagtctgctggaaatctctaccattaaaatgacttgggtcacccaggtgtctctatcattaagctgcctggatttggcagtgaatccctgccattagaatacccggggtctcccgggtgtctctatcaatcgactgccagggtcagctagaagtctctcccattgtaatgacttgggtacctcagagtctctcccactaaaatgcttggggtggtccaggtatctttagcatagaatgcctgtggctggctgggagtttctcttattggaatgccaaaagtcgaccagatgtctctatcattaggcagcctgcggtcggccaggagtttctttcattagaatgcctgggctctgccgttagattgcctggcattgcaaaggtatctttaccattagaatgcctggtgtcaacctacagtctctttccttggaatgcctgaagtggctcagttgtctctatcattagacagcctgtggtcagatgggaatctctccaattagaatgcctgaggtcgttcgggtgtatctataattagactgcctggaatcagccaaaagtgggtcccaagaaaatggggtaggctgggagtctctccaatcaaagtgcctggggtgcctcaggtgcctgtatcattaaaatacttgggttagttcgggaatctctcctattagaatgcctaggatcacccagttgtctctatcattagactgcctgtggtcggccggctgtctctcccactcaaatgtctggggtcacccagttgtctctatcaatagactgcctgtggtcggccggctgtttctcccactcaaatgtctggggtcacccagttgtctctatcattagactgcctgtggtcggctggctgtctctcccattcaaatgtctgggctcacccaggtgtctctatcattagacggcctggggtcagcttggagtctcttaaattagaatgcctgtggtagccttggtgtcttataaggacttatcattagactgcctgggctctgtcaggagtctttcttgttagaatgaatgaggttgtccaggtgtctttattattagactggctggcgttgaccaggagtctctccctttagaatgcctgggatcccgcaagtgtatgtaacattagactgcctgtggtcagctgggagtctctcccattagaatgcctgagatctccaagatgcctctatcattagactgtatgcggcctttcaggaatctcccattacaatgcctggggtcagccaggagctctcccattagaatgactagggttgttcaggtgtctgtatcattagactgcctgggcttggccaggagtttctcccattagaatgcctggggttgcccaattgtgtctattattagagtgtccagggtcaaccagaagtttctcccattacaatgccttggcttgccctggtttctgtttcattagaatgcctggggtcagccagaagtctctctctttagaatgcctgacgtggcccaggtgtctctatcattagtcagcttggtcagggctaggagtctttctcattagaatgcctggggtctcacaggttttgctaatattagactgcatggtgtcaggcaagaatcttttccattagaatgcctggggctggccaatagactttcacattagaatgcctggaggcactcaggtgtctctatcattagattgcctgaggttggatgcaagtttctccaattaaaatgcctggattcgcccaggtgtctctataattggactgtctgggtttggccagaattctttcccattagaatacctggggtgggctgggcacggtggctcacacctgtaatcccagaactttgggaggccaagaggggtggatcatgagttcaggagatggagaccctcctggctaacacagtgaaactccgtctctactaaaaacacagaaacattagctgggcatggtggcaagcacctgtagtcccagttactcaggaggctgaggcaggagaatggagtgaacccaggaagcagggcctgtagtgagccaagatcacaccactgccctccagcctggggaacagaacgaaactcaaaagaaaaagaaaaaaagaaaaagtaaaagaaaaagaacacctggtgtcacctaggtgtctgtatccttaaactgcctggaataggccaggagtctttcccattaaaatgcctaggttcggccaggagtttctccaattaaaatgcctggaatcaataatgtatctctatcattagactgcctgaggtcggccaggagtttctcctattagaatgcctagtgtcagctggcagtctcttccatgactgggatagccaaggtgtctctatcattagaacgtctgagttggctcagctgtctctatcattagaatgcctgaggtcagcctaaggtctctcccattatagtctctggggtcgcccatgtgactgtatcattagattgcctgcagtcagccagtggtctctcccattagaatgtctggggttgcacttgggttcagccaggtgtctctacttttagactgcctgggataggccaggatttgttcccattagaatgcttgagtatgcccaaatgtctctatcattagaatgcctgggtgttagaaatgctcattcctttgtgctgaaaagaagaactagtgctcaaagaatgttctcagcaaagcaattttactttctgcagaaagggtgctgtccatcagcaatcctgccacgagagcacaatgaacaaagaaggacaagaatatgtatcccttatgcattgggtccttactactgtgtcctatctccattggtgggagctggacctcacagtctaaactaaacccgattgactaacaacttaaactttcctaaataggtaaaggtaatggagaacaaaaggaaaagaggaagttgcttgcaaaagaacttagaaaagtaatatttccaaataaggaaggggcataagctgtgagatggaacatgcttgagcgtgtctagaacaaatatcttggttaaagtacgaagacatagaatgtacttattccctcatgtccaacagctacataggatagggtttaataaagagttcttagtattaaagcaaggaggcttgaaggaagttagtttttaaaagaaactattatttctaacatttgttatttaacaagaagggaaactttgaagaggaactttccactttccacactggggttggtggaaagtctcttccattggaatgcatggggtttcccaggtgtatctatcattagactgcctttggtctgccttgagtctcatctgtttgaatgcttggggtcaccgaggtgtctccatcattagagtgcctggccttggtcaggagtctctcccattagaacgcctggtgtcagctgtgagtctcctattatgatgcctgcaatttcccagtgtctctatcattagactgcccagggtcaagcagaagttccttccattagaatgcctgggttctcccaggtgtctctgtcattaggccacttggggttggctaggagtctctcctatgaatatgcctgaagctgcccatgtgtctctatcattagtctgcctgcggtcagacaggagtctccatattagaattactggagtcagccatgtgtctgtatcattagagtgcctgcattcggcaagaaatctttctatttagaatgcctggggtcagcctatttagaaatctttctatttagaatgcctggtctctgccataatgatgccttgggtcacccaggtgtctctatcattaaaatgcctgtgatcagctgggagtctctcccgttagaatgcctggggttcccaggaagcagagcttgcagtgagccaagatcacaccactgcactccagtctgggtgacagagcaaggctccatctcaaaaaaaaaaaaaaaaaaaaaaaaaaaaaaagaatgcctggagttgccaaggcatttctattcttagactgcccagggtctgccaggagtctctttaattagaatgcctgaagtcagccaggagtattttcacagatagcttgtttctagtttttattgtttgatattctgtttttcactataggcctcaattggctcacaaatatccctttgtagattctacaaaaaaagtgttttcaacctggtgaattgaaaaataggttacattctttgatatgaatccataacttagcattttcacagataactttttctagttactatcatgaaatattcggtttttcactgtagtcctcaatgggaaagaaatgttgattaacagattcttaaaaaagggtgtttccaacctgttgaatcaaaacaaaagttgaagtctgtgagatgactccacatatcttcaaaacatcatgacagatagcctgtttttcattcttatctctagatatgactccacacatcacaaaacatcctcacagatagcctgtttttctttcttatcactagatattttgtctttcaccataggcctcaataacctcggaaatgtcccattgtagattctacaaaagattgtttgaaacctggtgaatcaaaacacagatgtaataccatgagctgtatccacatatcacaaaccattttcacagatagtttgtttctacattttaccacagaatattcgatttttctctatagacctcattaggctaagaaatgtctcctcatagattgtgcaaaaacagcatttacaagctgaagaatcaaaacaaagattgaactctgtgagataaatccacacatcccaaagtattttcaaagatagtttgttttaaatttttattgcaggatatctggtttttcactataggcctcagtgggctcaaaactgtccctttgcaaattctacaaaaagagtgttaccaacctggtgaatcaaaacaccggttgtttcagtgagatgaatccacaaatcattaaggattttcacacatagcttgtttctagtttttaccttgggatatttggctttttactataggatttgctgggctcagaaatgtaccttcatagattctacaaaacgattgtttccaactcgtgaatcaaaacacaggttctgttcatgagataaattcacagatcataaagcattttcacagatatcttgtttcaaatttttatggtgaaatgtttgtttattcactataggactcaatgggctcagaaatgtttcctcgttgagtctacaaaaagattgtcttcaacctgttgaatcaaagcaaaggtttaacactttgagatgaatctgcatgtcaaaagctttttcaaagatagatttttttatagtttttatcccaggatatttggttttccacaatgggtctcaatgggctcagaaatgtccctttgcagattctacaaaaagagtgtttccaaagtggccaatcaaaacataggtttaaataagttagataaatctatatatcacaaagcattctcatagatagcttgtttatacttttatcatgaaatatttctttttttactgtagggctcaatgggctgtttaacaacaggtctctaaggcctcaaaaatttcccttagtagatttcactaaaatctactcccagctgtcccttagtagattttactaaaaaagcattttcaaccttttgaattataacaaaggtttaatcctgtgaaatgaatccacacatcgaaaagcattttcacagatagctagttcctagtttcattgtgggataggtagttcctagtttcatttgtctttcagtataggcctcaatgggttcagaaatttgccttcatagattccacaaaaagaatgtttttaacttggtgaattaaaacacaggttataattggtgagatgaatccacacatgactaaggatttttgaagatggcttgtttctggtttctaccttgggatatttggtttttcaatatcagcctcaccgggctcaaaaatatccattaatagatcaaaaaaaaaaaaagaaatttcccttcgtagattccacaaaaagagtgttttaacctggtgaattaaaacacatgttctaatttgtaagatgaatccacacatgactaaggatttttgcagatagcttgatagcttgtttgtggtttctaccttgggatatttgatttttcaatatcagcctcactgggctcaaagatatacattcgtagatcaaaaaaaaaaaaaaaaaaaaaagagtgtttccaacctggtgcctcaaaacaaagctttatctttgtgagataaatacacatatcaaaaacattttcacagacagcttgcttcaagtatttgttgcgggatatatggtttttcaatataggcctcagtgggctcagaaatgtacctttctagattctacaataagagtatttaaaacctgttgaatcaaaacacaggtttaaatttgttaggcaaatgcccatattaaaaagcactttcacagacagcttgctttaagtttttatcacatgatatttggttttttattattggcttcaatatgctcaaaaatattccttcatagattgtacaaaaaaagtgtttccaaccaggtgtatcaaaacagaggttccattgggtgatatgaatccacactttgcaaagtgtttttcctgatagcttgtttccatgttccttcatagtttccacaaaaagagtgattacaaacttttgaatcaaaacaaagttttagccctgtgacatgaatccacacatggcaaagcattttcaaagatagtttctttcaaatttttattgcaaaatattcggttcttcactatttgactcaatggactgagaaatgtcccttcatagattctacaaagagaatgtttccaaccttttgaatcaaaacaaaagtttaactgtgtgagatgaatccacatattgaaaagcattttcacagcatgtttctagcttttatcacaaaatattcgtgtttttactataggcctcaatgggctcagaaatctcccttcgtatagtaaaaaaaaagtttttccaacctggtgattcaaacacatgtttccttgggtgagatgaatccacacatcacaaagcactttcacagatagcttgtttctagtatttctcagagtgtattcagttttacaccacagacctcaataggctcagaaataccccttcagagattctacaaaaagagggtttccaacctgctgaattcaaagaaaggtttcactctgtgagatgaatccacacatcacaaagcagtttcacagatagcttctttctagtttttaatcacaggatatttggtttttcactataggcctcaatgggctctgaaatgtccgttcatagtttctacaaaaacagtgtttcaaacctgtagaatcaaaacaaagttttgatgatgtgagatgaatccacacatcacaaagccttttcacagatagcttgtttctattttttatcaccagatattccctctaggccttaatcagctcagaaaggttttctcagagattctataaaaggagtgtttcctacctgttgaattaaaacaaagttttaactatgtgagataaatccacatattgtaaagcattattacagatagcttgtttctagcttttatctcaggatatttggtttttcacaataagcctcagtgggctcataaatcttcctttgtagattctacaaaaaacagtttccaacctagtgaactaaaacaaaggtttaactttgtgaaatggatctatatatcatgaagcattttcatagatatctttctcctagtttttatcatgggatatttggtttttcactaaaagcctcaatgggctcagaaatgtccttttgtagattgtacaaaaagagtttttccaacctgttgaatcaaaacacaggtttaagtctgtgagataaatccacacattgcaaaatattttcacagacaggttgtttgtagtttttatttgcggacttttttttttaactgtaggcctaaatgggcttagaaatgtttttttttcatagattctgcaaaaagagtttttgcagcctgttgaatgaaaaaagttttaaatctgtgacataaatccacacatttcaaagcattttacaggtagcttgttactggtttttatcatgggaaattcagtttttcactacatgcctttatgggctaagaaatgtttcttcttcatttccacagaaatagtgttaacgacctggtgaatcaaaatacagtttccactcgatgagatgaatctacacataacaaatcattttcacagatagcttgtttctagtttttttttttttttatcagatattcggtttttcactataagcctcaatgggctcagaaatgtctcttcatagattctacaaaaagagtgtttccaacctggtgaatcaaaacacaggtctcattcagtgagatgaattcatacatcacaaagcattttcacacatagcttatttttggttttcatcacaaaatattttgtctttcactatatactttaaagtgttcagaaatgtcccattttagattctaccaaagaagtgtttccaacattttgaaccaaaacaaacatttatcttcctgagatgaatccacatattgcaaaacattttcacagatagtttaataacagttttcatctcgggatattctgtttttcactctaagcttcaatgggttcagaaatgtccctttgtaaattctacaaaaagagtattttcaaggttttcagtaaacacaaaggtttaactctgtgagatgaatcccaactttgcatagcattttcacaaatagcttatttcttgtttttatcacaagactttcagttttttactattggcatcaatgggctcagaaatgtccctttgtagcttctataaagagggcttccaacctgttgaaaaaaaagtttaactctgtgaaataaatccacacatcaataagcgttttcatggatattttgtttctagtttctatcatgggatatttgatttatcacaatagacctcaatcagctgagaaatgtccccgcctagtttcgacaataagagtatttttaacaggttgaattaaaacaaaggtttaacgctgtgagatgaatttacacatcacaaagcattttcacagatagcttcttcctagtttctattttgtgatattcagtttctcactacaggcctcagtgggttaaggaatgtcactttgttgtttccagagaaagagtgtttttaaccccttgaatcaaagcgaaggtttaactctgtgagatgaatctacaaatcagaaagggttttcacacgtagcttgtttctagtttttatccggggatatttggtttttcacaataggcctcaacgaactcagaaatgtccctttgtagattctacaagaagaggacttctaatttggtaaatccaaactcaggttccatttggtgagatgcatttacacatcacaaaacattttcacagatatcttgtttctagtttttatcatggcatattcggttttatattgtaggcctcaatagactcagaaatattttttcacagattctacagaaaaagtgtttactaactgttgaattaaaacaaaggttcaacactgtgagatggatctgcacatggcaaaacatttttacagttagcttgtttctaatttttaatgaggaatattcagtttttcactgtaggcctcaaaggactcagaaatatcccttcgtgaattctacaaaaaaagggtttccaatctggtgaataaaaataacagtgtgacttggtgaggtaaatgcacacatcaaaaagtatttttgcagatagcttgttcccacttttcatcacaggatatttggattttcctgtaggcctcattgcgctcagaaatgtccctttatagagtgtacaataaaagtgtttccagcctgatgaatcaaaacacaggttccattcagtgacatgaatctacacatcagaaagtattttcaccaataatttgtttctagttttcattgcaaaatattctgtttttcagtactggcatcaatggtctcaaaaatgtcccttcattgatcctacaaaaaaagtgtttccaatctggtgaatcaaaaccatggtttaactcttttagataaatccatgcatcacaaagcatttttacaaatagcttgtttctcttttttattgtgtgatattcagttttttactcttggcctcaatcttcttagaaattctcctttgtgttttctataaaaaactggttccaatgtcgttattcaaaacacaggagccaatctgtgagatgaatgctcacatcatgaaacattttcacagagagagtttcttcctagttttccatatggagtattaagattttcactcttgtccttagtgggctcagaaatgtcccttcctatattctacaaaaaaaagtgtagccaacatgttgaatcaaaaaagagcttaagctctgtgagatgaatatgcacaccacaaagcatattcagaggtagtatatttttagtttttgccatgggtattcaggttttcactataggccttcatgggttcagaaatgtcccttcatagattctacaagaagagtgtttccaacctagtgaatccaaaagtggcttaaatctgtgagaataatatatatatggaaaagcattttcacagacagcttgtttctagtttttatcatgggatattcagtttttctgtataggcctcaatgggttcagaaatatttcctcatggattctataggaagaatgtttccaaactgttgaattaaaagaaaggtttaagtctgtgagattaattgatgcatcagaattcattttcacagatagcttgtttccactttttatcataagaaattcagtttttcaatattggcctcaattggctcagaaatattttctcttacattccacaggaagcatgtttccaacctgatgaataaaaatacaagttccattccttgaaataaatccacacttcagaaagcattttcacagagggcttgtttctagtgtttatcacaagacattcagtttttcactataggccaaaatgggctcagaaatgtttcttcatagagtctacaaaaagagtgcttctaatctgttgaattaaaacaccggttccattcggtgtgatgaacttgcacatcacaaagcagtttggcagatatcttgtttctagtttttattgcaggacatttgggttttttaataggcttcaatgtgcttagaaatgtccctttgtagattctacaaaaagagtgtttcaagcctggtgaatcaaaacatgagttccattcggtgagatgaatgcacatcagaaagtattttcccagataccttgtttttagttttcatcgtggttccaactggttgaatcaagaaagaggtttaactctgtgagattaatccacacgtcaccaagcattttcacagatagcttgtttagagattgtgtagcagaatatttgatttttttcctatagtcctcaatgcggtaagaaattgtccctttgtagattctacaaaaagagtgtttccaaccagataagtcaaaacacaggttttattcattgagatgaatccacacgtctgaaagcatattcacagatattttgtttctagtttttatcacaaaatattttgttttttactataggcatttatgacctcaataatgtcccttcatgggttctacaaaaagtgtttctaacttgttgaatcaaaacgaaggtttaactctgtgaaatgaatctacacacaaatccttttcacagatagcttgtttctagtttatatcatgggatatttggtttttcactatagccctccacgggctcaggattgtcccttagtagaatccacaaaaaagtgtttccaactttttgaatcaaaaaaaggtttgactctgtgagatgatttcacacatcgtaaagcattttcacaggtagcttatttctagtttttatcgcaggtattctgtttttcactatgggcctcaatgggctcagaaatattccttcatagattctacaaaaagagcatttccaaccaggtgaatcaaaacaatggtttaagtcttttagatgaatccacatatcccaaataattttcactaatagctcattactggtttttaatcatgaaatattcatattcattttttcactataggcctgaatttgctcagaaatttttttttgtggatttgattgcaaagtgtttccaacctcatgaatcaaaacacaaaatcctatgggcctcaatgagctcagaaatgtccctttgtagattctacaaaaagagtgtttccaaccaggtgaatcaaaacaatggtttaagacttttagatgaatccatacatggcaaagcatttttacagatagcttgtttctagtttttatcaggggatattcagttttttactaaaggactcaatgggttcagaaatgtgccttcatagatcctacaagaacagtatttccaatctggtgaattaaaacacacgttcccctccgtgagttgaatctacgtatctcaaatcatattcactgataacttgtctctagtttttatcacaggagattttattttttactgtaggcctccatgacctgagtaatgacccctcatagagtctacagaagagtctttcccacctgtgaatcaaaacgaaggtttaactctaattcacacatggcaaagcattttcacagattgcttgtttctagttattagcacaagaaattttgtttttcactattggcctccatgcactcagaaatgttttttcatagattcttcaaaaagagtgttaaccttttaaattaaaaaaaaaagttttgtctctgtgagattattccacacatcacaaagcattttcacagttagcttttttaaccataggcctcaaagaacccagaaatgttgcccaggtgtctctatcattagactgcctggggccaaccagggaggggtctctcccattagaatgtctggggttgcacaggtgtttctatcattagattgtctagggttgcccaggagtctctccaattagaatgcatgtgtttggctgggtgtctctcacattagcatgcctggggtttgctgagagtctctctcattagaatgcctgtggttgagtggagcctctttcattaaaatgcctgaggtcagatggaagtctcacttattagagtgtttgagatcacctgggtgtctctattataatgcctgtggttgccttggagtctttccgattaaaatgcctggggtcgccctggtgtctctaccattagacagcctgggttcaaccaggaacctctctcattagaatgcctggtgtcaccaagatgtctttatcattagactgcctgggttcagccagtagtctctccctttagaatgcctgggttccgcaatgagtttcttccattaaaatgcctgtagttgataggtgtcccgattattagacggcctgaattcggccaggagtctcttccattaaaatgtctggggtcacccaggtgtctccagaattagactacttgtgcttggccagaaatctctcccattagaatgcatagtgttgccctggtgtctctatcagtagactgccaggggttggccagttgtctctttaattagaacgtctgatgttgcccaggtgactctattattagactgcctgtggtcagctgggagtctctcccattagtacacctgggatctcccgagtgtctctgtcattagactgcctgggttcagtggttgtctctttcattagaatgccaggggttgcccagttttctctattatcagaatacctgtgatcagccagaagtctctcccattaaaacgtctgagttcgcccaggtgtctctattattagaatgcctggagtcagccaggtgcctattccattagaatgcttggtgttgcccatgggtttgtatctttagaaaacctgggttcagccaagtgtttgccccataagaatgactgcagttggctggatatggtgactcatgcctgtaatcccagcacttttggagaccaagccaggaggatcccgaggtcaagagatggagaccatcctggccaacatggtgaaaccccatctctactaaaaatacaaaaattacctgggtgttgtggtgcatgcctgtagtcccagctactagggaggctgaggtaagagaatcacttgaacctgggaggcagaggttgcaatgagctgagatcatgccactgcactccagcctggtgacagagccagaatcaaaaaaacgaaaagacaaagaaaaaaacaaaacaatggctgcaatcacataggtgtcactatcattagacttcctggagacagtcaagagtatctcccattagaatgcctggggtcagcagggattgtctcctattagaatgcctgtggttgcccaggtgcctctatcattagactgcctggggtcggctggggcactctcttgtaataatgtgtggggtcgtgcagttgtctctatcattaaaatgcctgggtcccccagttgtctctatcattagaatgcctgctgtctgccaggagtctcattcattagaatgcctgggatcacccaggtttttcctttattagacagaattggccaggagtttctccaattaaaatgtctggcattgcccatatgtctctatcattatactacctggggtcatccaggattctctgccattagaatgtctgcgtttggccaggagtctctcacattagaatgcctttggttgccctggtgtctctatcattagaatgtctttggagggacaggagtctctgccattagaatgcctgtggttgttcagatgactctaactttagacagcctgccgttggccaggagtctctcccattagaatgcctaggctggatccaagtctttcccatttgaatgtggggttgccctgatatttttattattagactgcctggtgtcaaccgggagtctctcccatcagaatccctaaggtctcccagatgtccttattattagaatgcctggaagtgacaaaaagtctcacacattagaatgcctgaagtcgcccaggtgtctgtattataagactgcatgaggttgacgcagagtctctcccattagaatgcttggggtggcccaggtgtctctatcattagtatacctggggtcagccaggagtctttcccatgagaatgtctggggttgcctagatgtcgttatcataagactacagtgcctgtggttgttgaggtgtctctattattagaaagcctggcatcagccgggagtctctccctgtagaatgcctgaggttactcaggtgtctctattattagactgtctggggttagccaggagtctctcccatcagaatgcctaggtcacccagatgtctctatcataagactccctgaggtcagccaagagtctcttccattataatgcctgtggttgcccaagtgtctccatctttatactacctgcaatcagctgggagtctctccagttaaaatgtgtggggtctcccagggtatccatcattagaatgcctggggctggccagaagtctctcccattaaaatgcctggggtccaccaggtgtctctattatttgactgcctgtggtcggcccagagtcctccatgtgcaaagcctgggatcacccaggtgtttctatcattacattacctggatttggttgccagtctctcccattagaatgcttgtggtcacccaggtgcctctaacattagactgcctggtgttggctaagagtctgttccattaaaatgccttatgttgcccatgtgtctctataattagatggcctgaaagcagtgggagtctctcccattagaatgtctggggtcgcctaggagtctttttcattagactgcctggggtcaactaggagtgtctctcatcaaaatgcctggggtggccctgatgtctctatagagtgcattttgtcggcgaggagtctctgccattaaaatgcctgtggtcggtcaggtgactctaacctgagagttcctgcggttcaccaaaagtctctattattagaatgcctggggtggatcagcagtctcgtccattagaacgaggggttgccctggtgtctctattattagactgcctggcatctgacaggagtctctctcactagaatgcctggggccgcctagggctctctataattaggctgcctggagtcggcagaaagtctctcttagtagaatgtctggagtaggcctagagtctctcccattagaatgcctgtggtcgctcaggtgtctctatcatttgaatgcctagggtagactgggattttgtcacattagaatgcctacagtcgctcagctgtctctatcattagactgcctgcagtctgccagaattctcttgtattataaagcctgaggtcactgaagtttgtctatcattagactgcctggtgcaggccatgaatctctcccattagaatgcctggggttgccctgttgcctctaaccttggactgcctggggtcggccatgagtctctcccattaaaattcctggagtctattggagtttcttccattagaatgcctggggttgccaaggtgtctctatgattacactttctgggatttgcctggtatctctccacttagaatgtttgaggtcacccaggtgtctctataattatactgcctagagtcagccaagggtctctcccaagagaatgcctggggtcgcccggtagtctctttcattagaatggctgtgatcaccaaggtgcctttattttttacaatgcctggggttggccacgaatctccccaattagaatgcctgagtttggctgagagtctcccctattaggatgcatcacgttgcccagatgtctctataattttattgcctggggttggccaggagtatctcccattagaatgcctgggatcgcccagttgtctttatcattagactgactgaggttggccgaaagtcactcctgttaaaatggctggattcgcccaggtgtctctatcatttgactgcctggtgttggccaggagcctctcccactagaatgccttgggtcacttaggtgtttctataattagaatgccattggtctggcagaagtctctgccattagaatgcctgtggtcgcccaggagaacctaacctttgactgcctacataaaccaggagtctcttcaatcaaaatgtgtggggtaggtctggagtctcttccattagaatgcagggacacccttgtgtctctatcattggattgcctgtggttgggcgggagtctctcccattagaatgcctggggtcacccaggtgtgtctatcattagacagccttgggttggcaagaagtctctctcattacaatgtctggggtcgccccagtatctctatcattagactgcgtggggtcagcagggtgtctcccccattagaatgcctgatgtcaccaaggtgtctctatcattagactgcctggggtcagatgaaggcttcactagaatgcctggggtttggctgggagtatctcccattagaatgcctgctgtcacccaggtgtttctatgattagaatgcctggaatcggtggggagtctcttttattagaatgcctggggtcacctaggtgtctctatcattaagctgcctgcagtcggcaggcagtctcttttgttggaacacctggaatcgccctgttgtctccatcattagactgtctggggttggccaggagtctctcccattggaatgtttcaggtcagccaggagtctttttcattagaatgcctagggtggcccagttgtctctatcattagactgcctggattcggccgtgagtctctctcattagaatgcctggcatcacccaggtgcctctatcattagactgcctgcgtttggccaggatttgctcccgttagaatgcccgggatatcaaaattgtctctttcattagactgccttgggttggctgggagttcctcccattaaaattcccggggtcgccaaagtgtctttatcattaggctgcctggcgtaagccaggagtctctcccatgagaatacctggtgtcgccgggtgtctctacccttagactgcctgaattcggacacttgtttctatccttagactgcctggggtctgcaaggagtctctccccttagaatgcctgggttcgcccatgtgtctctataattagaatgcctggttcctgtgggagtctctcccattagaatgccttgggccgcccaggtgcctttatcagtagactgtgtggggttgaccaggtgtctctcccattagatttcctaaggctgttcagttttctctaacattagacatcctggagtccaccaggggtctctgccattagaatgccagtggtcgcccaggagactttatcctttgactgcctgtggtcggccagggggtgtctctgattagagtgcctgctgtgggtcaggaatctcttattagtatgttctttcacccagttgcctctgccattagactgcctggggtcagtcagcagtctctcccattagaatgcctgcagttgtccataagtctctatcagtagaatgtctggggtcagccgtgagtctctcccattacaatgcttgtggtcacccaggtacctctatcattagactgcctgtgatcagccaggagtctctccaattaaaatgcatggggtctcctaggatctccattattagaatgcctgaggtcgcccaggtatttctatcattagaatacctcatgtctgccaggagtctttctgattagaattcctcgggtggctcaggtatctttctcattaaaatgcctggggtcagccaaatgtctctcacattagaatgcctggggtcgataacgtgtatctatcattagaatgtctggggtcggctgggagtcttgcccagtaaaaagcctggggtcacccaggtgtttctattattagactgcctgggttcagctgcaagtctctcccattaaaatgcttggggtcgctcaggtgtctcttcattagactgcctggtgttgaccagaaatctgtatcattaaaatgtctcaggtcgtccatgtgtctttataattagactgacagaagttggcaagagttcctcccgttagaatgcctggcatcaccaaggattctctattattagacttcctggggtaggccaggactgtctcctaatagaatgcctgaggttacccaggtgtctttataattagagtgcatttcatcagcaaggactctctgccattataatacctgtgtttacccaggtgactctcacttgagagtgcctggagttggccaaaagtctgtctcattagaatgcctagggtgggtcagtagtctctttcattagaatgtggggtcgcccaggtatctctatcattaaactgcctggggttggctgggaatctcttccattagaatgcctggggtcacccaggtgtctctataattagactgcctggggtcagccaggagtctctcccaaaagagtgccttgggtcagccgagagtctctcatattagaatgcctgggtttgccaagatgtctctattattagaatgcctgggtttggccagaattctctcctattaagatacctggggtcacccaggtgcctctatcatcattagactgccaggagtcagccaaaagtctgtcttattagagtgcttggggtcacccaagtgcctctataattagacgacatggtgtcagctaggtgcctttcccattaaaatgcctggtgttgcccgactgtctctattttttgactgcctggggtaggctgggagtctccacagtagaaagcctgtggttgacagggagtcttcttagaatgcctgagttcctgtaggtgtctttatcattagactgccttgggtcagccgaaattatctccaattaaaacgcctgggttcgcccaggcgtctctataattagactgcctgggatcatccaggagtctctaagagaatgcctggagcggcccaggtgtctctatctttaaagtgcctggtgtcagccaggagtgtctctcatgagattgcctagtgtccattggaagtttctcttatcaaaatgccttatgtcgtccaggtgtctctatcattagaatgcctatggttggcatggagtctctccccttaaaatgtctgtggttggccaggtttctctattattagtctggctaaaaccggccatgtgtatcttacattagcatgcctgggtcacccagatgtcgctatttttagactccctcggttcagctgggaatgtctcccaatacaatgcctgcagtcgcccaggtttctctataattagaatgactttggtcagccaagagtctctaccattagaatgtctgtggtcccccgggtgactctaaccttagactgcctgcagtcagccagggtctcttccattagaatgcccaaagtgggtcaggagtctctcctattagaatgcggggttgccctggtgtccctatcattagactttatggaatcggctggaaagtctctctctttagaattcctgggttcatccaggtgtctctatcattagatggcctggcatcagccgggaatctctcctattagaatgtctgaagttgcccaagtatctatttttagactgcctgtgttcagccaggagtctttcccattaaaatgtctggagtcgcccaggtgtctctatcattagactgtccgggtttggccaccagtctctcccattagaatgcttgggatcacccatgtgtctctattattgaactatctggtgtcagctggaattctttccattaaaatgccttgggtctcccatgtgtctctataattaaactggcagaagtcagtgggagtttctcccgttagaatgcctggggtcgcccaggagtctctattattagactgcctgaggtaggccaggactgtctcccagtagaatgcctggggtcacccaggtgtctttataattagagtgtatttggtcatcgaggagtctctgccagtagaatgcttgtttgcccaggtgactctaacctgagagtgcctgcagtaggcaaaagttatctctcattagaatgctggggtggatcaggagtctcttccattagaatgtggggttgcccaagtgtctctatcattaaaccacctggggttggccaggagtctttcccattagaatgcctggggtcacccagttgtctctataattagactgcctgggatcaggcaggattctctcctgagaggatgccttgtgtctgccgggaatctctcatattagaatgtatggattcgccaaaatgtatctattgttagaatgcctggagtcgtctgggattctatcctattaagacgtctgggtcgcccaggtgtctctatcattagactgccatggttcagctgagagtctctcttattagaatgtctggggcaacccaagagtctctaaaattagcctgcctgttgtcggccagatgtctttcccattaaaatgcctggtgttacctgagtgtctctatttttagactgcctggggtcagctgggtctctcccattagaatgcctggggtcaacaaggtgtcttcatcattagactgccgggggcaagctgggagtctcctttattaaaatgcctgagttgcccagatgtctctacaattaaactgctcaattttgtccctgggtgctcgagactggagaatggcgatgacttttaccaagcatacttcctgcaaacacatttttaacaaagcacatcctgcacagccctaaatccattaaaccttgagtcaacacagcacatgtttctgtgagcacatggttggggctagggttacagattaacagcatctcaagaaagaagaatttttcttagtacagaacaaaatggagtttcttacgccttcttctttctacatagacacagtaacagtctgatctctctttctttcccccacagtgtcttccattagaatgcctaaagtcacgcaactgtctctatccttagactgcctgggttcagtcaggagtctctcacattaaaatgcttccctttagaatgctcaaaattggccaggagaatctcccattaaaatgcctggagtcaccctggtgtctctatcattagaatgcctgggttcagccaggaatctctcccattagaattcctggggtcacccatgtgtctctataattagactgcctgggtaggcaaggagtctctcctgttagaatgccttgggtcagcctaaagtctctttcattagaatgactgtgatcgttcaggtgtctctataatttgaccacctgtggttggtcagggactttccctattaaaatgcctgaagtcaactaggtgtctccattattagacagcccgaggtcggccaggaatctctcccattagaatgcctgaagtcagccaggaggttttgtttgtttttatttttgcttttatggagtctcactgtcttcagtctggaatgcaatggcatgatctcggctcactgcaaactccacctccagggttcactctcccgagtagctgggactacaggcacaggccaccacacccagctaatttttgtatttctagtagagacaggttttcaccatgttggccaggatggtatcaatctcttgcactcgtgatccacccctctcagcctccaaaagtgctgagattacaggcatgggccactgcgcccagccaggagtctgtttgtttagattgccttgggttgcccagttgtctctgtcactagcctgctggtctcggccgagagtctctcccattatagagacgttaatgtgtctctataattagactgccttgggcccgcttggtgtctctcacattagaatgcctcgggtctcccaggtgtctctgtcattagcctccctggggtcggtgaggaatctctcatattagaatgcttgggctcccaaaggtgtctctgtaagactactgtcagccaggagtctctcccattagaatgcctggggtcacttgggattctctcccattaaattacctgtggtggctcaggtgtctctatcattagaatgcctcgggttggctggaagtctctaccattttaaggcctggggtcgccaaggtgtctccatcattagaatacctggagtcgataaggagtctctcccattagaatgcctagagtgtgccaggagtctctcccattaaaatgcctgaggtcgcccaggtgtctctatcattagactgcctggggtcaaccaggagtctctcccattagaatgcctgtggtccatcaggtgtcgctatcattagagtgcctttgttcagcaggaagtctctctccttagaattcctggggttgtaatccaagcactttgggaggccgagggcagtggatcacctgacgtcaggagatcaagagcagcctggctaacatggtgaaaccctgtctctactaaaaatacaaaaattagttggatgcagtggcacacatcattaatcccagctacttggggggctgaggcaaaagaatcacttgaacccagaaaatggaagttgcagtgagttgagattgtgtcactctattttagcttctgtgacaaaatgagactctgtctcaaaaaaaaaaaatgcctgaggtcggcctggagtctctccaataatgatgcctggggtcgcccaggtgtctctatcacaataaagcctggggtcgaccgggagtctctcgtgttagaatgtctggagttgcggaggtgtctctatcattacaatgcctgggctcagccaggagtctctcccattagaatgcctgaagtcacccaagtgtctctatccttagactgcctgaggtgggccaaaggtctctcccattagaatgcctggattggcctggagtattttcacagatagattgtttctagtttttcttgaggaatattcagtttctcacaatagacctcaatgtgctcagaaatgtcccttcacagattctacaaagcagtgcttttagcccattgaatcaaaacacaggttccattcggtgagatgaatccacacattacaaagcattttcacgtgtagcttgtttctaattttcatcgtgggaaatttggtttttcactaaaggctgcaatgggctcagaaatgtcttttcataggttctacaaaaagagtgtttacaatgtgttgaatgaaaacataggtttaactctatgagatgaatccacacatcacaaagcattttcacagaaaatttctttttagtttttatcgtgagatatttgtttctttactataggattcaaagggctcagaaatgtctttttgtatattctacaaaaaaagtgttttcaaactgttgaatcaaaacaaaggattaactctgtgacatgaatccacacatcataaaacgtttccacagatagcttgtttccagtttgtattgtgagatacccatttttccaaatatgcctcagtgagctcagaaatgtttcttcatagattctacaaaaaaagtttccaacctgttgaattaaaacaaagttttaagcctttgatatgaatccacacattgcaaaacgttttcacagatagctgctttctagtttttatcacgggatattagctttttcacaataggtttcaatgggctcagaaatgtcccttcgtagattctacaaaaaaagtttccaatctgtggaattaaaacagttttaactctgtgcattaaatctacacatcggaaattattttcacagatatcttgtttctaaattttaggtgggatattttgttattcactataagccttaatgagctcagaaacgtccctttgtaaattctacaaaaaaaaaagcttttccaaggtgttgaataaaaacaaaagtttaattttgagagctgaattaacatattacaaaacgttttcacggatagtttgtttctagtttatattgtagaaaatttaattttttactataagcatcaacgggttcagaaatatccatttctagatactacaaaaagagtgatttcaacgttttaaatcaaaacaaaggttttactctgtgatatgaaaccacacatcacaaacattttcccagatagtttgtttctagtttttatcatgggatattccgttttttactaaagacctcaatgggctcaggactgtccctaagtagattttacaggaagagtgttttgaacctgttgaaacaaaacaaaggttaacgtctgtgagatgaatccacacatcacaaagcattttcacagaaaccctgtttctggtttttatcacaggaaatttggtttttcatgataggtttaaaaggacaaagaaacgtactgtcatagattctgctaaaaaagtcgttccaacctgttgaatcaaaacataggttaaatgctgtgagataaatccacatataccaaagcattttcaaagatagcttgtttctaatttttatcacagaatatttggtttttcacagtaggcctcaatgggctcagaaatgtacctctgtagattctacaaaaagtgtttccaaccttgtgaatcaaaacacaggtgccattcagttagatgaatgcacacatcacaaaacattttcacatacagcttgtctctagtttttattgtgggatattagtttcttactataggtctcaaaaagctaagaaatttctatttgtagattctaaaaaatagtgtttccaatgtgttgaataaaaacaatggtttaactttgtgagatgaatctatacatcacaaagtattttcacagataggttgtttcaagtttttaccatgggataattgatttttcacaataggcctcaatgggctctgaaatgtcccttcgtagattctacaaaaagtgtgtttccaactgggtgaatcaaaatacaggttccatttggtgagatgaatccacacatcacaaacattccacacgtatcttgtttctagtttctatttcaggatatgtggtttttcactatacttctcaatgagctcagaaatgttttttcatagattctacagagagagtgtttccaacatgttgaatcaaaacaatggtttaactttgtgagataaacccacacatcacaaagcattttcacacatagctggtttccagcgtttgttcaagaaattcagtttttcactgtaggccacaatgggctcagatatgtctctttttagaccttttattttccacaaaaagagagtttccaacctgatgaatcaatacaaagattcatctctgtgagatgaatcacatttctcaaagcatttccatatttaggttgtttctagtttttaccacaggatcctttgtttttcaatacaggcctcgatgggctcataaatgttccttcatagattctacaaatagaaggtttcagtcctgatgatttacaatgcaggtttaattcagtgagaagaatccacacatcataaaactttttcacagcgtatttctagtttttatcattggatagtcggtttgtcactgtagacttcaatgagttcagaaatatcccttcatagattctacaaaaatagtgtttccagcatcttgaatcaaaatgcatttttcattcagtgagataaatacagacatcaaaaaacattttcacagaaagcttgtttctaatttttgtcaggggatattctgtttttcactaagtctcaacgggcttcgatatgtcccatcatagatacttcaaaaattgtgttttcaacctgttgaatcaaaacaaatgttgaactctctgacatgaaacctcacatggcaaagcatgtttacacataccatgtttctagcttttatcatacaattttttattttttcactgtatgcaccatgggctcagaaatgtctttttgtagtttctacaaaaagagtgtttccaatctgttgataaaagcaaaagtttaactatgtgagatgaatccacacatcacagagcattgtcacagatagcttgtttctagttattatgggttatccagtttttcactctaggctacaataagttaagaagtgttttttcatagattttacaaggaatatgattccaacattttgaatcaaaacaaaggtttcattctgtgagataaatccgtataccacaaagtatttttataaatagcttctttctagttttagttgtgtgatatttgggttttcacactaggcctcaatgggctaagaaatgttccttcatagattttacaaagaacctggttttaacctgttgaatcaaaataaaggtttaactctgtgagaaatatccacccttcacgaagcattttcatgtatagtttctttctagtttcatggtggaatattcagtttttcagtataggtttcaaaggctcagaaatttctctttgtagttctataaaaagagtattttcaatttgttgaatcaaaacataggtttaactctgtgagataaatccactcatcacaaaacattttcacgtatagcttgtttctagtttatattgcagtatatttgttttttcactataggccttaatggtctttgaaattgtcccttcatatattctacactaagagtatttccaacctgttgaatcaaaacaaagattttactctgagataactccacccatcacaaagcattttcatacatacctagtttccagtttttatttcaggatattcggttttactctataaaccagaataagctcagaaatgtcttttcatagattctacaaaaagaatgctttcaacctgttgaataaaacaaaggtttaacttcatgagatgaatccacctaatgcaaagcattttcacagatagcttgtttctagttcttaccatgagataatcaatttaatataggcctcaacgggcttagaaatatcctttggtagattccacaaaaagagtttttccaaccagctgaatcaaaacacaggttccatgtggtgagatgaatccaaagatcacaaatcgttttcacaggtaggttgtttctagtttttatcacagaatattctgttgttcactataggcctcgatggcctcggaaatgtcccttcatagattctaaaaaaaagtgtttccaacccagtgaatcacaacacaagatccattcagtgagaagaatccccatataacaaagcattttcacagagagcttgtttgtactttgcatagcgggatattcagtttctcaccttacatctcgataagctcaaaaacgtctcttcatagattctacataaagaatgttttcaaccagttgaatcaaatcaaaaatttaacactgtgagataaatccacaaatcaaaaagcattttcataggtagtttgtttctactacctatttatcaggggatgcttggtttttcactacaagtctcaatgggctcagaaatgatgtcccttcatagattctaaaaaaaaaaaaaaaaaaaaaaaaaaaagagtgtttaccacctgttgaatcaaaattaaaattttactctatgagataaatctacaccttgcaatgcattttcattgatagattctttttagtttatatcatgagatatttgattttttactacaggcctcaatggtctcggaaacatccctttgtagattctacaaagaaaggatttccaacctgttaagtcaaaacaaagatttaactctgtgagataaaaccatgcatcgcaaagcatttcacagatagcttgttcctagttcttttcgtggaatattcattttttcactatagccctcaataagcttagaaatgttcctttgtagattttacaaaaaagtgatttcagtctaacgaattagaacaaggctttaactcagtgagacaaatccagatgttaaaaagcattttctcagatagcttgtttctagttttataatgggatatttcatttttcactataggcctcaatggtctcataaatatccctttgtagattctacaataagagtgtttccaacttgttgaaccaaaacacaggtttgattcggtgagacaaattcacagctttcaaagtattttcacagaaagcttgtttctagtttctatagtgcaatattcgagttttcacagtaagcctcaatgggctcagaaatgactcttcattgatcctacaaaaagagtctatccaacttgaatcaaaacgcaggtttcattcagtgggataaatccacacatcacaaaacatattcgcagataacttgtttctactttttatcgtgggatattcagatcttcactataggccttcatgcactcagtaatgtctcttctagattctaaaaaagaatgtttccaacttgcttaatcaaaaccaaggtttaactctgtgtgatgaatccacacatcacaaagcgttttaattgataacttgtttttagtttaaatatttgaattttcactataggcctcaatagactcagaaatgtctctttgtagattctatatagagtgttttcaacctgttgaataaaaaaaaagtttaactctgtgagataaatccacacattgcaaagcattttcacagagagcttgtttttagtttgtgtcacagaatattcactttttcactatagacctcaaagggctcaaaaatgtttcttcatagattgtaaataaaagtgtttcaaacctagtgaatcaaaacacaggttttatttagtcaaatgaattaatacattacaaagcattttcacagatagcttctttcttgtttttaacatgggatattttgtttttcactaaaggcctcaatggtctcagaaatgtccctttctagattctacaaaaggagtgtttccaacctcttgaatgaaaataaaggtttcactctgtgagataaatccacacattgcaaagcattttcacgtatacctagtttctagtttttatcacaaaatatttggttattctctataaacatgaataagctcagaaatgtctttttgtagattctacaaaaagaacgttttcaatctgttgaattaaaacaatggcttacctctgtaagatgaatccacacaaggcaaagcattttcacagatagcttacttctagtgtttatcacaggataatagatttttttactatagatcctcaatgggctcagaaatatcctttcatagattctacaaaaagagtgttttccacactaaatcaaaactcatctttaatttggtgaggtgaatccaaataacacaatgcattttcacagatggcttgtttctagtttttatcatggaatactcagtttttcactataggcttcagtggcctcagacatgtccctttataggttctagaaaaagagtgtttccagtctggtgtatcacaactcaggtgccactcagtgagaagagtccacatatcacaaagcattttcacagatagcctgtttctacttttcagagcaggatattcagctgcttactataggcctgaagaactgcagaaatgtccctctgtagattttactaaaagagtgtttccaaccagcttaatgcaaacaaaaatttaacactgtaatataaatcctcaaattaccgagcatcttctctgatagctcgtttctagtatttatcgtggaatatttggttttttactatagggcttaattggctcggaaaagttccttcatagattctgaaagaagtgtatttctaactgttgaatcaaaaccaaggtttaactctatgagatgaatcaacacatcacaaagcattttcacatagtttgcttctagtttttatcaagggatattcatttttttgctataagcctagatagcatcagaaatgttcctttgtagattctacaaaaagcctgtttcaaactgttgaatcaaaataaaagtttaactctgtgagatgtatccacaggttgcaaagcatgttaacagatgcttctttctattttttatcacaggatattcagtttattactataggcctcaatgggctcaaaaatgtcacttcgtagattctacaaaataagtgtttccaatctgttatatcaaaacaaagttttatctctatgagatgaatccacacttagcaatgcattttcatagatagcttctttttagtttatatcgtgagatattcaattttttaatatagtcctcaatgggctcagatacatccctttgtagattctacaaaaaagtgttttcaacctgttgaatcaaaacaaagctttaaccctgtaagatgaatccacacatcacaaatagctcagatcacatcacagatagcttgtttctagtttttattgcagaatatttgttattttactataggcctcaacaggctcagaaatggttttttgtagattctacaaaaatcctgtttccaacctgatgattgaaaagaaaggtttacttctgtgagataaatccagacattggaaagtattttcacaggtagcttgtttcttgtttttattgtgggatattcaggttttcactatagacctcattgggctcagaaatgtcccttcatagattctacaaaaagagtgtttctaactttttgagtcaaaacacaggtttgatttggtgagatgaatccacaaatagcaaagtattttcatataaaacttgtttctagtttttatcgcaggatttttttattacaggccttaatgggctcagaaatgtctctttgtagattctataaaaaagtgtttcccatctgttgaatcaaaacagaggtttaacactgtgaggttaatccacacatcacaaagcattttcacagatagcttgtttctagtttttatagggcaatgttcaattttttactgtagtcctcaatgggctcagaaatgtccctttgtagattttacaaaaagagtgtttctaacttggtgagtcaaaacacagtttccattctgtgagataaatccacacatcacaaagcatattcccagatttttttccttctttttatcacaggatattaggtttttcactatatgggctcagtgatgtcccttctcaattatacaaaattgagtgtttccaatcagttgaataaaaacaaaggtttaaacctgtgagatgaatcctcacatctcaaagcattttaactgagaggctgtttttagtttttatcgtggcatactctgtttttcactatgcacctcaatgggctcagaaatccctttatagattttataaaaagtatattaccaatcttttgaatcaaaatagaggttctactctgtgagatgaatccacacatggcaaaaaattttcacagattgcttgtttctagtttttgtcatgggatattccatttttcagtataggtcttaatgagtttagaaatgtaaccttgtagattctacaaaaaaagtgtttccataatgttaaatgaacaaggaagtttaactttgtcagataaatctacacatctcaaaccattttcacagatagtttgtttgtagtttttatcataagatatttgtttttttactataggcctcaataggttccaaaatgtccatttgtaggttctacaaaactagtgtgtcctgttgaatcaaaacagaggtttaactctgtgatatgaatctacatatcacaaagcattttctcagttagctttttttctagtttttataacacgtctatttcattagaattcctgggatcacccaggtgtttctttcattagacatgctggggtgggccaggggtctctctcattagaatgtctggggtggccctggtttctctatcattagagtgcctggggtcagccaagtatctctcccattagaatgcctaggcttaacaaaatgtttttatcattagactgcctgcagttgggtgagagtctctcccattaaaatacctgtgtttgatcaagtgtctctatcattagaattcctgtgttcggctggaaatctctcttaatagaatgcctggggtcagccagttgtctccatcattagactgcctgggtttggctaagagtgcctctcattggaatgcctgggattgcccaagtggctctacgattagactgcctgtggtcccccagatgtctctttcatttgaatgcctggggtcgtacaggtgtctctataattagactgccagtagtcagcaagtagtcttttccattagaatacctgtggttgccaagtagtctctatttttagactgcctgcagtcacccaatagtctcccattagaatgtgtgttgtcaactggaagtctcttgcattagaatgcctgtgttgctcaggagtctcttccagtagaatgcctggggttggctagttgcctctataattagaaagcctggggtcttccttgagcctctcccattacatgtctttcagtcgaccaggtaggtgtttctatcattagactgcctggggacggccaggaatctctttcattggaatgcccacttttgcccagatgtctttatcattagactcctggtgtcagccgggagcctctcccattaaaatgcctaaggcagctcagttgtctttatcattggactgcctggggttggccaggagtctttccaactagactgcctggggtctgccgggagtctctcagattaaaatgtttttgatcacccaggtgtctctattattagactgcctggggtcggcagaaaatccctgccattagaatgcctttggtcgcccaggtgtctccatcattcaacttctggagtcagctaggagtccctcccattacaatgcctagaatcgctgggagtctctcccattataatgcctggggatgcttaggtatctttagcattagaatgcctgtggtcagccaggagtctttcccaataaaatgcaaagtgttgccccatgtcaatattattagaaggcctggggtcagctgggagtctctcccattagaaaacctggggtctgccaaaagtatttttcattagaatgcctggcatctcacagatttctctattattagaatacctggagttggcatggagcctctccaattaaaatgcccgtgtcacccagatgtctctataatttgactgcttcgggtcagccaagagactctttcaagagaatgcctggggttctctagaaatctctcttattagaatgccaggtgtctgtattattaaaatacctggggtagttctggagtttcacccattcaaatgcctgtggttgcccaggtgtctctatcattagactgcctgtggttggctgggtgtctctcccattagaatgtgtggggtcgatttggtgtcgctattattaggttgccttgggtcaaccaggagtctctttcattagaatgcctggggttggccatgagtctctcccattagaatgtctggggtcgcccaggtgtctctatcattagacttgcctggggtcagcttggagtcgcttacattagaatgcctggggtcaccctggtgtctttatagttagactgtctgggctcagtgtgaggtttctctcattagaatgcctgagtttgcccagttgtctctttcattagactgcctgggatcggccaggagtctctcccattagaatccctgaggcagcccagctgtctctatcattagattgcctgagtttggtgaaagtttctcccattagaatgcctcaggttgcccaggtgtctctattattagactgcccatggttggccaggtgtatctcccattagaatgcctcaggtccctcaggtgtctctactattagactgcccatggttggccaggtgcctttcccgttcgaatgcctgggattgcccaggtgtctctataattagactacttgggatcggtcagaagtgtctcccattcgaatgcctgtttttacccaggtgtctgtatcattatactacctgtcatcagccagtcatttcccgttagagtgcctaggttgcaccaaaaatcccttgcattagaatgtttggggtctcccaggtgtctctattgttagactgcttgggttcagtcagtagtctttcccattacaatgcatgaggtcgcccaggtgtctttatcactagacagcctggggttggctgggagtctctcccattagaatgcctggggtcattcagatgtcttcataattagactgccttgggtcacccaggagtctctccagttagaatgcttgctgttgcccaagtgtccttatccttaaactgtctggtgtctgccaggggtctgtccaattagaatgcctggggttggacgggagaaagcctgtggttgctcagctgtctctatcattagaatgcctggggtcagccgaaagtctctcccattcgaatgcctggagtcacccatgtgtctctcttattagccttcctggcatcagccaggagtttcttccattaaaatgcctgagatcaccaagatatctctttcgttagacttcctggggtcagccaggaagctctctcattacaatgccttgtgtgaggtgaaagtctttcccagaagtatgcctggtttctctatcattagacttcctggggtcaaccaggaatctcacacacaagaatgcctgtggttgcccacgtttctttataattagactgtttggccagaactctcttccattagaatgtctggtgttgcccaggtgactctaccattagaatgcctagaattggccagaagtctctcccatgaaaatgcctgggtcacccaggtgactctatcactagactgcctgggattgggtgggagtctctcccattataatctctgtggtcaatcaggtgtctctatcattagaatccctgaggtctgctggcaatcttttctattagaatttctgtttgcccaggtttctctatcattagactgcctgaggtcagccggcacgttttcccattattatacctgggataataatttcccattattatacctgggataatattgctcatgcacctctatcattaaacaacctaagtttggaaggggtctctctcattagaatgattggggttgcccaggtatctctttcattacactacctggggtcagctgggaatctctcccattaggattcacaccaagtgtctgtataattaaactgcctggggttgcccagttatctctttcattacaccacctggggtcagctgggaatctctcccattaggattcacaccaagtgtctctataattaaactggctgggctcagccaggagtctttcccattagaatggttatggtcactcaggtgtctttaccttagactgcttgaggtaagccaagagtctctcccattagaattcctggcatcgtctgagagtctttaacattagaatgcctggggtcatgcaggtgtctctataattagactgcttgaggtcagcaaagagtctctcccaagagaatacctggggttggctgaaagttttgcccattacaacgcctggggttgccgaggtgtctctatcattagaatgcctggggttgtccaggagtctctcccattagaatgcctagggttgcctaggtgtctccatcattagactgactgcagtcagctgtaaatctctcccattagaatgcatgggatcacccaggtgtctctatcactagactgccttgggtccgccgggagtcttttccatttcaatgtttcagattgcccccatgtctctacaattaggctgcctaagctcgtccaggagtctctcctaataaaatgcctgtggttggccaggtgtctctatcattagtctgtctaagttcagctgggagtatctcccattagaatgcctggggtcattcaggtgtctgtatcatcacattgcctggggtcgccaaggaatctcttttgttagaatgtctggggtagcccaggtgtctctataattagactgctgggggtcagccaggagtctctcccattagaatacctgtggtctcccaggtgtcttctttctaagactgcctgtgatcgacctcaagtcttccattaaaattcctgggatctgctgggagtctttttccttagaatgcctggggtcaccaaaatgtctttatcattagactgctggggtttgaccaggagtctctcccattaaaatgtctgaggtctccaaagtgtctctatcattagactgcctgggatcagctgggagtctctcccattagaatgcctggggtcgaccaggtgttgttatctttagtctacctgggttggccaggagtttcttccattagaatgcctgatgtcagatggaaatatctcctattagaatgactgaggtagcccagttttctctgtcactagaatgcctgggatcacccaggtttccctatcattataatgccagagattggcctaaattctccttcattagtgttccttgcatcaccaaggtgactctctccttagactgacttggtttggtgggtagtctctctcattagaatgcctggggttgccctgttgtctgtaacattagactgcctgaaattggccggaagtctcttccactggaaggtctgggttcgccaaaatgactctatcattagactgtctggtgtcagttggaagcctctcccattagaatgcctggggtaagatggaattctctaccattagaatgcctagggttggctgggagtctctcccattagagtgcctgtggtgtcccaaatgtctctatcattagaatgcctggggttgaccaagaacctctttcattagaatgtgtgggtttgcccaagtgtatctatcattagactgcctgtggtcaatggagtctctctggattgaatgcctggggtcgctctggtgtctccaacattagactgcttggggttgctcagaagtcacccccaatgcctggagtcagcatggaatctctccttttaaaatgccttgtgtctcccagatgtctctatcattagactacttggagtcatccgggagtctctccaatgagaagacctggggctgcccatgtgtctctattattagactgccttgtggtcagccttacattagaatgcatggggtagcccaggtgtctctatcattaaattgcctgaatttggctagaagtctatctgtttagagtgactagagtgaacctggagtgtctcccataacaatgcctggtgttgcccaggtgtcttcaccattggaatgcctggtatcagccaggagtctgtctcattagaatgcctggagtgacgcaggtgtctctatcattagactggctggggtcggctaggaatgtctcccattagaatgcatggggtaacccagatgactatcctttgactgcctggggttggtgaggagtctctcccattataatgcttgaaatcaaccagtattttcacaaatagcttgtttcgagtttttattgagggatattcattttttcactacaggcctcaatgggctcagaaatgtcccttttgtaaactctacaaaaagagtgtttccaacatggtgaatcaacaggttagattcgtctagattaatccacacattagaaagaattttcacagatagctctggttattattacaagatatttggtttttcttttttctattttttattatactttaagttttagggtacatgtgcacaatgtgcaggttagttacatatgtatacatgtgccatgttggtgtgctgcacccattaactcgtcatttaacattaggtatatctcctaatgctatccctcccccctccccctaccccacaacaggccccggtgtgtgatgctccccctcctgtgtccatctgttctcattgttcaattcccacctatgagtgagaacatacagtgtttggttttttgtccttgcgatagtttgctgagaatgatggcttccagcttcatccatgtccctacaaaggacatgaactcatcattttttatggctgtatagtattccatggtgtatatgtgccacgttttcttaatccggtctatcattgttggacatttggcttggttgcaagtctttgctattgtgaatagtgctgcaataaacatacctatgcaagtgtctttatagcagcatgatttataatccttcaggtatatacccagtaatgggatggctgggtcaaatggtatttctagctctacatccctgaggaatcaccacactgacttccacaagggttggactggtttacagtcccaccaacagtgtaaaagtgtttgtctttctccacatcctctccagcacctatggtttcctgaatttttaatgattgccattctaactggtgtgagatggtatctcattgtggttttgatttgcatttctctgatggcaagtgatgatgagtgttttttcatgtgtgttttggctgcataaatgtcttcttttgagaagcgtctgttcatatcctttgcccacttgttgatggggttgtttgtttttttcttgtaaatttgtttgagttcattgaagattctggatattagccctttgtcagatgagtagattgtaaaaattttctcccattttgtagtttgtctgttcactctgatggtagtttcttgtgctgtgcagaagctctttagtttaattagatcttatttgtcaattttggcttttgtttccattgcttttggtgttttagacatgaagtcctcgcctatgcctatgtcctgaatggtattgcttaggttttcttcctgggtttttatggttttaggtctaacatgtaagtctttaatccatcttgagttaatttttgtataaagtgtaaggaagggatctcatttcagctttctacatatggctagccagtttttcaagcaccatttattaaatagggaatcctttccccatttcttgtttttgtcaggtttgtcaaagatcagatggttgtagatgtgcagcattatttctgagggctctgttctgttctattggtctaaatctctgttttgataccagtactatgctgttttggttactgtagccttgtagtatagtttgaagtcgggtagcgtgatgcctccagctttgttcttttggcttaggattgacttggcgatgtgggctcttttttggttccatatgaactttaaagtagttttttccaattctttgaagaaagtcattggtagcttgatggggatggcattgaatctataaattaccttgggcagtatggccattttcacgatattgatttttcctatccatgagcatggaatattcttccatttgtttgtgtcctcttttatttcattgagcattggtttgtagttctcattgaagaagtccttcatatcccttgtaagttggattcctaggtattttattctctttgaagcaattgtgaatgggagttcactcatgatttggctctccgtttgtctgttactggtgtataagaatgcttctgatttttgcacatttattttgtatcctgagacttttctgaagttgcctatcagcttaaggagattttgggttgagacaatggggttttctagatatacaatcatctcattggcaaacagggaaaatttgacttcctcttttcctaattgaatacactttctttctcctgcctgattgccctggccagaacttccaacactatgttgaataggagtggtgagagaggacatccctgtcttgtgccagttttcaaagggaatgcttccagttttcgcacattcaatatgatattggctgtgggtttgtcatagatagctcttattattttgaggtacatcccatcaatacctactttattgagagtttttagcatgaagggctgttgaattttgtcgaaggctttttctgcatctattgagataatcatatggttttgtcattggttctgtttatatgctggattacgtttattgatttgcctatgttgaaccagcgttgcatccctgggatgaagcccacttgatcatggtggataagctttttgatgtgctgctggattcggtttgccagtatttattgaggatttttatatcaatgttcatcagggatattgttctaaaattctctttttttttgttgtgtctctgccaggctttggtaacaggatgatgctggcctcataaaatgagttagggaggactccctctttttctattgattggagtagtttcagaaggaatggtaccagctcctcctttttcctctggtagaattcagctatgaatccatgtggtccttgactttttttgcttggcaagctattaattattgcctcaatttcagagcctgttattagtctattcaaagattcaacttcttcctggtttagtcttgggaggtgtatgtgtcgaggaatttatccatttcttctatattgtctagtttatttgtgtagaggtgtttatagtattctctgatggtagtttgtatttctatgggatcggtggtgatatcccctttatcattttttattgagtctatttgattcctctctcttttcttctttattagtcttgctagtggtctatcaattttgttgatcttttaaaaaaaccagctcctggattcattgattttttgaagggttttttgcgtgtctatttccttcagctctactctgatcttagttgttcttgccttctgctagattttgaatgtgtttgctcttgcttctctagttcttttaattgtgatgttagggtgtcaattttagatctttcctactttctcttgtgggcgtttagtgctataaatttccctctacacactgctttgaatgcgtcccagagattctggtatgttgtgtctttgttctccttggtttcaaagaacatctttatttctgcctccatttcgttatgtacccagtagtcactcaggagcaggttgttcagtttccatgtcattgagcggttttcagtgagtttcttaatcctgcgttctagtttgattgcactgtggtctgagagacattttgttataatttctgtccttttacatttgcggaagagtgctttacttccaactatgtggtcaattttggaataagtgtggtgtggtgctgaaaagaatttatattctgttgatttggggtggagagttctgtagatatctattaggtccacttggtgcagagctgagttcagttcctggatatccttgctaactttctgtctcgttgatctgtctaatgttgacagtggggtgttaaagtctcccattattactgtgtgggagtctaagtctctttgtaggtctctaaggacttgctttatgaatctgggtgctcctgtattgggtgcatatatatttaggatagttagctcttcttgttgaattgatccctttaccattatataatggccttctttgtctcttttgatctttgttggtttaaattctgttttatcagagactaggattgcaattcctgcctttttatgttttccattttcttggtagatcttcctccatccctttattttaagcctatgtgtgtctctgtatgtgagatgtgtttcctgaatacagcatactgatagctcctgaccttttatccaatttgccagtctgtgtcttttaattggagcatttagcccatttgcatttaaggttaatattgttacgtgtgagtttgatcctgtcattatgatgttagctggctattttgctcattaggtgatgcagtttcttcctagcctcaatggtctttacaatttggcctgtttttgcagtggctggtatcagttgttcctttccatgtttagtgcttccttcaggagctcttttagggaaggcctggtggtgacgaaatctctcagcatttgcttgtctgtaaagcattttatttctccttcacttatgaagcttagtttgactgtatatgaaattctgcgttgaaaattctgttctttaagaatgttgaatattggcccccactctcttccggcttgtagagtttctactgacatatctgctgtttgtccgatgggcttccctttgtgggtaacccgacctttctctctggctatccttaacattttttccttcatttgaaatttggcgaatctgacaattatgtgtcttggagttgctcttctcgaggagtatctttgtagcattctctgttatttcctgaatttgaatgttggcctgccttgctagattggggaaattctcctggatattatcccgcagagtgttttccaacttggttccattctccctgtcactttcggatacaacaatccgatgtagatttggggtttttacatagtcccatatttcttgaaggctttgttcatttctttttattcttttttctataagcttctcttctcacttcatttcattcatttgatcttccatcactgataccctttcttccagttgatcgaattggttactgaggcttgtgcattcatcatgtatttctcgtgccttggttttcagctccatcaagtcctttaaggacttctctgcattggctattctagttagctattcatctaactttttttcaaggtttttaacttctttgccatgggttcgaactttctcttttagctcagaatagtttgatcatctgaagccttcttctctcaagtcgtcaaagtcattctccatccagctttgtttcattgctggtgaggagctgcattcctttggaggaggagaggcactctaatttttagagtttccagtttttcttttctgttttattccccatttttgtggttttttctacctttggtcttcaatgatggtgacgtacagatggggtttttgtgtggatgtcctttctgtttgttagttttccttctaacagtcaggaccctcagctgcaggtctgttggagtttgctggaggtccactccagaccctatttgcctaggtatcagcagcaaaggctgcagaacagcggatattggtgaacagcaaatgttgatgcctgattgttcctctggaagttttgtctcagaggagtacccggccttgtgaggtgtcagtctgcccctactggggggtgcttcccagttatgctacttggggttcagggacccacttgaggaggcaatctctccattctcagatctccagctgcgtgctgggagaaccactactctcttcaaagctgtcagacagggacaattaaatctgcaaaggtttctgttgccttttgtttggctatgtcctgcccccggaggtggagtctacagaggcaggcaggcctccttgagctgtggtgggctccaccaagttcgagcttcctagccactttgtttacctattcaagcctcggcaatggtgggtgcccctccccaagcctctctgccaccttgcagtttgatcttatactgctgtgctagcaataagcaaggctccatgggtgtagaaccctccaagccatgcaagggatataatctcctggtgtgccatttgctaagaccattggaaaagtgcagtattatggtgggagtgacctgattttccaggtgccatctgtcaccactttctttgactaggaaagtgaattccctgaccccttgtgcttcccaggtgaggtgatgcctcaccctcttttggctcatgctcggtgtcctgcacccactgtcctgaacccactttccaacactccccagtgagatgaacctggtacctcagttggaaatgcagaaatcatccatcttctgtgtggctcatgctgggagctgtagactggagctgttcctatttggcttttttggctccacccctgatgtttggtttttcacagtaggcctcaatgagcacaaaaatgtccctgcatagattctacaaaagaaaaagaaaggttttttaacctgttgaatcaaaagaaaggtttaactctgtgagatgaatccacttgtcacaaagcatcttcacagatagcttgtttttagttcttatcgcatgatatatcatttctcactataggcctcaagaggctcagaaattttcctttgtagattctacaaacacagtgttcccaacctggtgaataaaaacacatggtttagtcaatgagatgaatcaccgactaaactgaagatcttcacaggtagcctgtttacagtttttgccttgggacattcggtttttcactataggcctcatggaactcaggcctaattttgaacaatgccttcgtagattctacaaatagagtgttcccaaactggtaagtcaaaatgcaggttctattcagtgagataaatctatatatcacaaagcattttcacagatttcttgtttcaaatttttatggcaggatatttgttttttcactataggccccaatgggctcagaaatgtcccttcatagattctagaataagagtgtttccagcctcttaaatcaaaagaaagtttccatttcgtgagataaatccacacatcataaattatttttacagatggcttgtttctattttttatcttgtgatattctgtttttcactgtaggcctcaagtggctcataatgtattgttgtaaattgtaaaaaaaaaaaaaaaaaaaaaaaaaaaaaaagagtgtttttaactcttgggatgaatccacacattgagaagcattttcacagagagcttgtgtctagtgtttatcatgggatatttggtttttgactatcagcctcaatgtgtgctaaaatgtcccttcacatattctaaaaaaaagggtatttccaacctggtcaatcaaaacgcaggttacattacagaagatgaatccacacatcacaaagcatttttacagagaggttgtttctagtttttaatcatgggatattcagtttttcactattggcttcaatgggctcagaaatgttcctttgtagatcctacaaaaataaagtttcccatttggtgagttaaaaagcaggttccattaggtgagatgaattcacatattgtaatgcattttcacagagagcttatttctcataaaaaattgcaggatagtcagtttttcacaatgggccacaataatgtcataaatatcccttcgtagatactacaaaaggagtgtttacaacctgctgaatcaaaacacaacttttattaagtacaataaattcacacactacaaagccattttcaacagatagcttgtttctcgtttttaaggtgggatattcagtttttcactataggtcccagtgggctcagaaatgtcacttcatagattctacaaaaacagtgtttccaatctggtgactcaaaacactggttccattcagtaagattaatccatatatcacaaaagattttaacagagagcttgtttctagttgttatcacaaaatattcggtttttcaatataggcttcaaagagttcaaaaatgtacgttcttagattctacaagaagagggtttcctacctggtgaatcattacatagactcaattcagtgagatgaatccacatatcacaaatcattttcacagatagattgtttctagtttgtatccagggttttttgttttttgttttttttttactgtaggccccaatagactcagaaatgtctcttcataggttctgcagatgttcccaacctattcaatcaaaatgaagctttaactctgtgaggtgaatctattggggaacctgccctgataggcacataggttcttttctattttccctaagcttcagccagcttgagaaataaagggacaaagtacaaaagagagaaactttaaacctgggcatccaggggagacaacacatgtgggtaggttccaggatgccccacaagccgtaaaaccagcaaatttttgttagggagtttcaaaacgggagggagtatatgaataggtgtgggtcacagacaccaagtacttcacaaggtaatagaatattacaaggcaaataaaggcagggtgagatcacaggaccacaggaccagggtgaaattaaaattgctgatgaagtttctggcaccactgtcattgataagatcttgtcaggagacaggttttgagagcaaccgttctgactaaaatttattaggcaggaatttcctcttcctaataagcctgggagtgctatgggagactgggtctatttcacccctgcagtctacagaccataaaagacaggcattcctgggggtccgtctatagacctataccaccaggcatgtattctctttcccagggatgttctttgctgagaaaaagaattcagcaatatttctcccatttgcttttgaaagaagagaaatgtggctctgttccacctggctcaccagtggtcagattttaaggttatctctcttattctctgaacaattgctgttatcctgttcttttttcaaggtgcccagatttcatatttgttcaaacacacatgctctacaatttgtgcagttaacgcaattatcacattgttctgaggcaacatacatcttcctcagctgacaggattaagagattaaagtaaagacaggcataggaaatcacaagggtattgattggggaaatgataagtgtccatgaaatcttcacaatttatgtttagagattgcagtaaagacaggcataagaaattttaaaagtattaattaggtgaaataataaatgtccatgaaatcttcacaatccacattcttcagccatggcttcagctggttcctccatttggggtccctgacttcccacaacatctctccctttctttttatataaatgtgccatggtgatgaaggcttgttcgttctctcaattttgatgcaggattctttgactggtctggcacactaaaaacaagccgattaaacagagaaacataattccaaaatttactacagtggagcccccaataaacttaatccaagttgtgggctttaatccataaagattttctgccacctgatctaacacctcagctccaggcagaatggataagtgagcttgagaggattcaaaaatttgtttctttaatttagttgtgtccaatgataaattatcttccctacctagaaggtgtcctttgaccgtttcccatgaatgatcagtctcattataggaatatggggtgatgcagaaatccaaagtattccactggcactgcatttgcatgcaatgttcgaaactcactacccaatctccaagccaaataacagactgttttaaatcattaatttgatttgccaatttttgatcaatgccttgttaagaattccacatttgggtggaattggcttgccaatcattaacaaaataagccgtttgaatggattggtgtaatgccattccggcagtggtggtcattgcagtgactgtaattaggcccatgataacagtgatcaaagtgaaaacaaatctcttggacctttttagaattcgctgtcgcacttcattaattaaatgtattgagggggaggattcccaaggtctaggtaaagttactggaatccagattccttcttaagatcgaaccaatattatgcttctcttggagtcaaaatgggagttaatacaaaggtatagatgacaattaatgcattggacagtttgattattcgtccaaattttgatatttcctactaacagcatgtaagggggcttaacacaactctgtatgggaatagtcaggttggaggtaagtaaagcagaatgtctcgttctacgttgataaggagagagtgggacagtagtgggaaaaacagtcagaagagttttcctttcccatacttgcagtccagacatggcaatagccaatttccaaagttctgggtgttcaggctcagaatggggagtatcatacgaggcctgggtgggggataatgcctttatcttcccattttaagggaaagcataagctgatcctcctatgcaaagtagaatgatgattcttgttctcccaataagaaaaaaaataagtagcctccaggcattcccttccaccagaggagcaattgttttttaaatagccctttggtgcccagcctattattaaaccatatgagtcattttttaatattactgcatgtgagttaacacaatcttcccaaattaaagttttagatgggccctcaaaatttttagggcacgattttcctgcaggtttatattgaaagtatggggtatctcccattattcttcctttcatttgttttaaaggagaaagagagaggccagagaccaaatgtcctgttttatctgtagttgatctttccggaagataagcagcctagacttgagtttccagatggatgcaaccaggtgcatgtctgaggcacagagacgggtatttacaacccatggtaacattaaatgcagtgccttcttctcctggttgagcagggcaacggtcatctgtggctccaggcagtcacacactatcgttagtgtagatttgtgcaggagcatctaccctggtgagaggtcgaataagtggaggaagaggcacataagcccaataagaataattatgtgtagcaggtaaatcagtgtgagaggaaactggtgagacagaaagtataaggaggagaatcattaaataaaacctagtgtaaatgagattgaaggctgaaggaggaagagaagaacagagggatgttattttcaggctaatagaaatggtgagatttttaggtttgtaaggagaaaaagaaaggtaatcaggagaagtgggattagttagatgggtctccattgccatcagggaggattgatttaaatccattgtgatttggtgtgcctttttctgagcagttggcacagatcttaccacttctgaaggtagtctctgacacagacgtcttttctctgtggttttcattgtcagtgttcacccgaagcttgaatcttctggtgggttcccagacaggggattgatgatctcctggtgaaaccaggcatatcctcttccctacgttataattgtgccagattcccaggtattggcttgggagtttttccataacactggtttgccttcgtttaaggaaaattttttgcctgtataatggcgttcagctgcagttagagtattatctttagaaacatttaaaaaaattaaagtaaacaatgccaaatgtaattgggagtggggagtagttaaatcatgtttaggttgttcagactgtttggacaattgggtttttaaagtgtgattggcccgttccaccacagcctgtccctgaggattgtaagggattccagtaatatgggaaattccccactgttgcataaatgaatcaaaagccttactaacatatccagggacattgtgtctttatttgatatggaagccccataactgcaaagcaagaatacagattttttttaacataggccctgccttcccctgtttggcaagtagcccagataaaacctgagaaggtatctgcagagacatgcacatatgacagtatgccaaaggagctaacatgagtcacatccattttccataaagcattaggagttaggcctctaggattaacacaaggttcctgatttggaagtacgaagacctggcactgagagcagccgtgaacaataaacttagcctgtttccaggtaagagcaaatttatcttttaatccagcggcattgacatgagtgagattatggaactcctgagcttcttgggttgtaaaagagaccaaacagttgactttatggttaccagcagacatgggtcctggtaaagtggtatgagacccaatatgtgtaatatagaaagggtgtctacgttggtgaaccacctgttgtaaccttgaaaataaagaagccaattcagaattatcaatgtgtttgatagcagcagtttctatatttttagtggcatgtacaacataagcagaatctgagacaatatttaaaggtttgaggaaatcctgtaaggcagtaatcacagcaattaactccaccttttgagcagaagcataagaggtagaaataagtttgtctgtaggacctatgtaaccagcattgccattactggagccatcagtgaacactgtaatggcctcaggaatgggttgatctttggttaattgaggaaccacccaagacgtcatttatataaaaatcaaacaatttgttttttgaataatgattgtcaataacgccaataaaatcagccaagtgaatttgccacagtacagaatgttgaaaggcagattgaacttcaagccaatttaaaggaagtacaattacatttggatcaaatctagaaatttgaagtattctacactgagcctgcccaattaatatggctatttggtctacataaacaaagttttggacatagaatgaggaaggaaacgccactccattaaatcattatgttgaactattagtccagtaggggagtgtgatgaagcaaaaaacagaaactgaaaaggctgaaacggctgtactctagataactgggaggtctgaattctttcctctatgaattccagttctagtaaagcctcaggggtcaaagtcccggggctgtggagatcggaatctccccacagcatagagaacaagttacacagcgcataagttggaatgcctaaagtaggttttaaataatttacgttacccaaaaggttttgaaagtcatttaaagtgtttaaagaatctctcctaatttgaaatttttgaggttgaatacattgtttatcgatcaccattcctaaatattgaacaggagtgatctgttgaattttatcctgagcgacgtgtaatctagcctctgtaacacagtggcttaaaatgtggtaacagtcaattaattctttatcattgggggcagcaattaaaatgtcatcaatataatgaagaatatacacctcaggaaattgggcttgaactggtgaaagctcttgtccaacataaagctggcagattgtagggctatttagcattccctgaagaagtactttccaacaattatgagctgcaggctcctgattattgatagatggtacagtaaaagcaaatttttcacaatccgatttatgtaaagcaatatgaaaaaaagcaatctttaagatcaataactatgagaggccaatttttaggtattagagcaggggcaggcaagccaggttggacggcccccataggtttaattacagtgttaatggcccttaaatcagttaccatccgccatttgcctgatttcttttttactagaaacacaggagaattccaaggggaaagagaaggttccacatttccaagttgcaactgctcagaaaccaattgatttaaatctcccagtttttctttagaaagcggccactgctgaacccaaacaggtgtgtcagatttccattgcaaaggaataggatcaggaggcgtggcagcagctgccactaaaaaggataacctaaaccagccctgttttcttttatagtaactgggaggggtttactaatcccctcgtgctgtggtctgagaccgagtccaggaacaaaccccatattttccatcatatgctgactgggagcattataagagttacgtggaatattaatttcagcccgccattgtgccagtaaatctctaccccaaagatcaatgggaattggcatgatatagggctgaattttacccttttgaccatcagggccagtgcaaggcaaaataaatgtgctctcataaacttccttggcctttccaacacctactagtcccatgttagtgggatgtttaagccaagaggaaggccataaactagaggaaataagagaaacatcaccaccagtatctactaagccctcaaactttcttccttcaatgtgtatggtgcaggtgggctgttgtttagcaattacattaatccaataagcggccttttcactgccagagcccatcccagggccatgtgtcttatctcttttgtttaaaatgatattaggtagtaaaagcaattgagcaattgactcaccagccagaatggaaacaggaaccttggcagacacaattaatttaatctcgtcaacggaatcagatttaatgagaccagtttgaatggtgactcccttagcagaggtggatgctctacctaacacccggcccaccgaaccttgagataaagggccagtgacccccgtggggacaatcaagggcaaagaatcaagaagtaaattcagaggaatagtactacagatatcaaccatcccacctcctactgtggaggttgacaagcattgtagtgagacagaagaagctgggacccatttggttttgctgtaggtagatttgtttgtgctaggggttgcattgggactgcctgaagtggaaacacaatgttggtcttagttggaagtgtcccgtttgatgctgggacctgggactagccccactccctatttccctgtcactgtggtagggggtttccatctatatcatacttagagtggcaaatatttgcccaaagtttacctttgcgacaacgtgggcaaacagtaggagcaacatttggccatgtttgttgaactggcttggcctcttgtaagtttttaacagtgcaattttttcaaatatgaccaagttggccacaattatagcaggctccaagagaagaattaatgggaccagtttggttggtgtccttcatggcccgtgcccacagaatagctttgtgggtgtctgatccaatgccttcacaaactttaatatatgcaggcaacacgtgatcaggtaaattttgttgttggacagaacgcatggccaatttacattcagggattgcattttcaaaagctaatatacgaaggagaatgccttgagcgtgcttcatcagagacagattttttcaacagcatcttgtaatttagctaaaaaatcagggaataattcagagtgaccttgtttaactatggtaaaagaaacaggagcttggcctggagtgcgtaatttattccaagctctcatacacacctttgttacttgttctgtggtaaaggcatcaaagtttaattgggcataagcatcagagaaattatcggagcctgtgagctgagcctgagtaattagaatgccattactcatatttagctgagcctgcaaacaggcctcctctgaccaccaggtacagaattgtaaatgctgacatggggttagaacagcttttgccaaaaggtcccaatctaaaggaagtaaagtgacctcagtacaaaaagtttgtaaaactatcttaacgtaaggagaagtaggaccatactgagtacaagcatccttaaattcttttaaaaaggtaagattaagaggtacataaagatgcatttgtaacccttggaagttaggtggatctagcacaaccagagaagtccattcatctaatccacttatttctttgttttggcataataagcattgcattgaagtttcaagagtaggcatctgagatggagtcggcatggaagtgacaggaaaagcatgtgcagttaagggaaactgagggtgagagggtcggaccaggatgagaatgtgagaaagaggcattgggggagcagaacgagcagaagtatactggtgattactgttgttcaagtgtgaagaagggtatagagaagcaatctgagtggatggtaaagtgactggttgaggaaacgaaacgacaggagggtgaggggctgaagtgtatggtgggagggcctggagaatgataggtaaattgtagtttggtcctggagccattagctgacttcagagatttgaagagagaagaattagcatacctgtggtactgggctgtgtgctttgcagccgtgggagtttcaagtactggctcttcatgaaattcgtgaaaagaagataagtagggggtaactttaaaccaaagtcaccatagttagacatagaattttcagcatcattaggtgggggaggagtagccaaagggagagtctgatcagatgggggccctgtgggagaggaaggctgagggaaaggtggaggatctgaggaaaaggcagaaaactgtggcaactgcagggggtcacgagatccacacaccactaagacagcaggtaccaaccaccccaaacagtgacaggaacataataccctgctgagaccagctaccagaatgctgtaccaacacaatcccacacttttacatctatggttcctttttcaggaaaccaaggacagaaccactgccctgaatagagtgaccatattttccatggttactcggacactgccctgttttaacaggagtttaatatagcagatataagtatgatgcttagactctgcatgacccatagttaacccagaccatacatagactactcatcactcatcagggattctaacaagtgtatctgtggaccaagccgatgacgtttcaccacacctaccaaagggaatcgggttccctcatgcacttaggaaaaaagaaagacaatgtgtgtgctagatattggggaacctgccccaatagtcacgtatgttctttcctatattccctaagcattggccagtttgagaaataaagtgacagagtacaaaagagagaaattttaaagctgggcgtccggggtagacatcacgtattggtaggttccatgatgccccacaagctgtaaaaccagcaaggttttattaaggcgtttcaaaaggagagggagtatacgaataggtgtgggtcacgaacatcaagtacttcacaaggtaatagaatatcacaaggcaaatggaggcagggcgagatcacaggaccacaggaccgtggtgaaattaaaattgctaatgaagttttgggcaccattgtcattgataacatcttattaggagaaagggttttgagagcaaccggtctgactaaaatttattagacaggaatttcctcttcccaataagcctgggagcactatgggagactggggtctatttcacccctgtagtctacagaccataaaagaggggcacgcacaggggggccatctatagacttatacccctgggtgcatattctctttcccagggatgttccttgctgagaaaaagaattcagcaatatttctcctatttgcttttgaaagaagagaaatatggctctgttccatctggctcaccagcagtcagagtttaaggttatctctcttattctctgaacaattgctcttatcgtgttcttttttcaaggtgcccagatttcatatttgttcaaacacacatgctctacagtttgtgcaggtaacacaattatcacattgtcctgaggcaacatacatctgcctcagctgacaggactaagagattaaagtaaagacaggcataggaaatcacaagggtattgattggggaaatgataagcgtccatgaaatcttcacaatttatgtttagagattgcagtaaagacacgcataagaaattataaaagtattaatttggtgaactaataaatgtccatgaaatcttcacaatccacattcttctgccatggcttcagccagtccctccatttggggtccctgacttcccacaacatgaatccacacattgcaaaacatttttactaatagcgtgtttctcatttttaaggtgggatattcagtttttcactataggtttcaaagggctcagaaatgtgccttcattaattttacaaaaacagagtttccaacctgttgaatcaaagaaaaagttttgcactgtgagatgaatgcacatatcacaaagaattttcatagatgccttgtttctggtttttattgcgggatatttggtttttcactataggtctcaatgagctcagaaattacaatttctagattctacaaggagagtgtttccaagctgttcaatcaaaataataatttaactctgagatgaatcaacatatcacaagcatttttcacagatagcttctttctagtttttatcacaagatagtctgttttatattataggcctcaatgggctcagaaatgtccctttggagattttacaaaaagagtatttccaatcaggtgattcaaaacacaagttatatttggtgagatgaatgtacacattgcaaagcattttttcaaatagcttgcttctaatttttatcacgaaatatttggtttcttactgtaggtctcaattgactcataaatgtcccttcatagattctacaacaacagtgtttttaacctagtgaatcaaacaaagggtttcattcagtgagataagtccacgcattacaaagcactttcagagcaagcttgtttctagtttttatcatgggctattcagtgtgtaacaataggagtcgaaggcctcagaaatgtcccttcgtagattctacaacaacagtgtttccaacctatttaattaaagcaaaggtttaactttctaagatgaatccagacaccacaaagcatttttatacttgccttgtttctagtttttattgtgggatattcgatttttcaacataggcctgagtgggctcagaaatgtcttttcattgattctacaaaaagagtgtttccaacccgtttaattaaaacaaagatttaactctgtgagatgaatccaaacatcacaaagcatttccacagatagcttgcttctggtttttatcactggatattccgtttttcactataggcctcaatgagctcagaaatgttccttcatagattctacaaaaagcaagtttccaaggtgatgaatcaaaacaaaagtttaaatctgtgatgtaaatccagaaaacccaaagcattttaacttatagcttgtttctactttttaacatggaatattcagtttttcattataggcctcagtgagctctgaaatgttccttagtagatgctacaaaaagagtgtttcaacctattgaatcaaaacaaatgtgtaactttgtaagaggaattcccacatggcaaagcatttgcacagataggttgtttgtacttttcattgcgggatactctgtattttattataagcatcaatgctcccagaaatctcccttcatagattctacaacaagagtgtttccaacctgttgaatcaaaacaaaggtttaactctgttagatgaatccacatattacaatccattttcagagataacttttctctggttttattttgggatattctatttttcagtataggtttcaattgggtcagaaatgtttcttcatagattctaagaaaagcgtgtttccaaattgatgaattaaaagagaggtttaactctgtcagatgaattcagaccttgcaaagcatttcaacggatagcttgtttctactttttatcacaggatattctgtttttcactataaacttcaatgggatcagagatgttttttgtagattctgtaaaaaagggtttttcacctgttgaatccaaacaaagctttaactctgtgagatgaatccatgcatcacaaagcatttttacagatagcatttttctacttcttatagcaggatattgggtttctcagtataggcctaaatggactcagaaatgtctcattgtacattctacaaaaacattgtttccaacctggtgaatcaaaacagagattccattcggggagacgaatccacacatcacaaagcaacttcacatattgcgtttttctagtttttatcacaggatcctcggtttttcactatgtgcctcaatgggctcagaaatttcccttcctagattttacaaaaaaagtgtttccaacctggtgactcaaaacccaggtttgattcagtgagaagaatccagatatcacaaagcattttcacatacagcttgtttctatatgtttcttgttttattgtgggatatttgtttctttattataggcctcaatggcctctgaaaggtcccttcatagattctacaaagaaactgtttccaaactgatgaatcaaaacaatggtttaactctgtgagataaatacacacattgcaaagcattttcacagttagcttctttagaatgtttaatgcagtatattcagtttttcagtgtaggacttaatggcctcaaaaacgtttcttcatagataatacagtaaaagtgtttccaacctgttgaatcaaaacaaagttttaactgttggagatgaactcacatatggcaaagcattttcacacatagcgtttttatactttttatcacaggatattagatttttcactaccagtctcaatgagctcagaaatttcttttcgtagatactacaaaacgaggctttccagcctattgaatcaaaacaaagttttaactcattgaaataaatccacatttcatgaagcattttcacagatagcttgtttctattttttattgcaaaatatacggtctgtcactataggcctacattgtcttagaaatatccctttatagattctacagcaagagtgttttcaacctggtgaatcaatacacaggttccatttggtgagactaatccacacatcctaaagcattttcacagatagcatgcccaggggtctctatcattatactgccttgggtcagccagcagtctctcccattattatgcctggagtcgcccaggtttctctatcattagactgcctggggtcagcctgaagtctctcccgttagaatgcctggggttgcccaggtgtctctataattagacttcctggtctcagccaggagtctctcacattaaaatgcttagtgtgacattggtgtctctatcattagactgcctgaattgggccaggagtctctttcattggaatgtctggggttgaccaggtgtctctaaccttaggcagtctagggttggaccagagtctctcccattagaacgtctaaggtcatccaggtgtctttttcattagactgcatgaggtctcccagagcccctcccattagaatgcctgggttcgtggatgcattttcatcattagtctggtgcaggtcggtcgctgatatctccaatgagaatgcctggcatctcccaaattctctcaaattagaatgtctggaatcgactgggagtctctcccattagaatgcctgtggtgcccagttgtctatcattagactgcttcatgtcagttgggattctttttttttagaatgcctggggtggcccaggtgtctctgccattagactgcttggtgtcagccaggagtctctcttattcgactgcctggtgtcgcccaggtgtctattttaagactgcatggggttggccaggagatctttcattagaatgcatggaattggctgggaatctctcccattagaatgtttgggtttgctcatgtgtctctatcattagactgctgggttcagccagcagtctctcccataagaatgtctgggattgcccaggtttctctattattagactgcctggtgtcagtcaggagtctcttccattagaattgcctgtggttggccaggagtcttacccattagaattaccaaggtagcccagatgtctttataattagacagcctggggtcagctcgaagtctcttctattagaatgcttggggtccatcaggtgtctctattattagactgcctggggtcagccagaagtgtctcccattaaaatacttgcagtcgttcagatttctctgtcattatactgcctgcgattggccgggagtctctttcattagattgcctgtggttacacagatgtctctatcattagactgcctgggctggcttggtgtctttcccattagaatgccagggttcagatggaagtctctcccattagaatgccttaggtcacccaggtttctgtattattagaatgcctggggtcagatgatagtcttttccattagaatgtctaggatcacctaagtgtctctactattagactgcctgtgttcgaccattagtctctcccattacaatcactgggctcaatcagtgtctctagcattagactgcctggggttgaccacgagtatctcccattagaatgctttctgtcatctgtgagtctctcccattggagtgactggggtcacccacgtgtctctaacattagactgtttgtggttgcacagctctctctaacattagattgcttggggtcatctgagagtttcccccattagaatgcctggagtggagtcccccaggtgtctctattatgagaatgcctggtgtcagccagcagtctctcccattagaatgcctgtggtatcccaggtgtcactattattagaattcctggggtcagtggagggtatctcccataagaatgcctggtgtcacccaggtgtctctaacattagattggctggggtcctttggaagtctccactattaggatgcctggggtcacccaagtgcctctaccattagactgcctgtggtcagttgggaatctcccccattagaatggctggggtcacctaggtgtctctatgcatggattgcctgggtttgtacagaagtctctctaattagaatgcctgaggtcatccaggtgtctgtattattagactgcctggggtcaggcaggagtctctcccattagaatatctggtgtcagttggaattctctctcattagaatgcttggggtcgcatacgtgtatctattatttgcatgcctgggcttgtcctgtagtctctcccattaggatgcctgtggttgcccagttgtgaacattagactgcctggggtccgccaagattgtctcttattaaaatgccttgagttatctgggagtttctcccattagtatgcctgggttcgcccaggtgtctctatcattagactgcctggggtcagctggtaggctctcctattaaaatgccttgggtggcttagattcctctacagtttgactgcctgtgttcagccagcaatctctcccattagaatacctgggctctcccaggtgtctctattgttagactgcctgaagtcagccaggagtgtctctcattagaatacctgtattcatccctatttctttattaaactgcctgcggtttggcgggagtctctcccattaaaatgcctgtcctcgataaggtgtctatcatttgaatgcctgggttcaaccaggaatctctcttattagaacgtctccggtcatcgaagtgtctctatcataagactgcctgcatcagctaggtgtctctaccattagggtccctgaggtcagccgggagtctctattattagaatgccaagggtcgttcagatgtctctatcattagagagtctatggtcagccaggagtcttttttattagaatgcctggtgtcggcccagagtctctcccgttagaatgcctggagtcacagaggtgtctctattattagaatgtctgatgtcggtctggagtctctcccattagaatgtcttaagtcacatagatgactttatcattagactgcctgtgatcagccgggaatctctccaattaaaattcctgaggtcacccaggtgtctctataatcagactgcctggggtcagccagacatctctttcaaaagaatgcctgggtttggctggaagtctctcctattagaatgcctcgggatgcccaggtgtctctatcattaaaacgtcaagtcatctgagagtctcttccattaaaatgcctgcagtcacccagttgtctctatcattagatttcctgcagttggtcgggtgtctctcccactagaattcctggggtttttcaggtgtctctatcattagactgcctggggtaggccacgagtctctcccattagaatgcccagggtcggcggtgagtccctcccattagaatgcctagggtcacccaggtgtctctatcattagacggcctggagtcggctgggagtcactccccttaaaatgcctggggtcgatttggcatatataattatactgcctaggtttggccagaagtttctcccattagaatgcctgggtttgcccaggagttctatcattagactgcctggggtcagctgggagtctcttccgttagaatgcctggggttgctcaggtgtctttattattagactgcctgggatccaccaggagtctctttccttagaatgccttgggtcaccgaaatgtctttataattagactgcttgggttcggcaggagtctatctcattagaatgactgaggttccccaggtgactctatcgttagactaacaggggtcagcaatgaatctctcccattagaatgcctgaggttgcctaggtgtctctaacctaagactgccttttgtcggctagaagtctcttactagaatgcctggggttggctaggagtctcttctattagaatatttggggtcgcccaggtgtatcatttgattgcctgggctctgctgggagtctctcccattagaatgcctgtggttgcccaggtgtctctatcattagactgcctggggtccaccgggagtctcttccattagaatacctggggtcacccggtgtttctgtaattaggctgccttgggtcagcatggagtctttccattaaaatgcctgtggtcgcccaggtgtttctatccttaaactgcctgtagtcggccaagagtctctcccattagaatgcctggaatttcccgggagcctgtaccattagaatgcctggggtcacccagatgtctctgttattagcctgcctaagttcagccaggaatcactttcattagaatgcctggggttgcccaggggtttctatcagactgcctggtgtcagccagcagtctctcccattagaatcactggggttggcagggagtctctcccagtagattaccttgggtcgccacagtgtctctatcattggaatgcctggggtcgaccaggagtcttttgtattaaaatgcctggggttggctgggtatctccaacattagactgcctgcgtttggcattcagtttctcccattataatgcctgtgatcatccaggcgtctctaacattagactgcctgtggttggctgggtgtctctccagtttgaatgcctggttttggctggcagtctctcctattaaaatgctaggggtcgaaaaactgtctttatcattgaagtgcccgtggtagaccagaagtccctctcattagaatgttggaggttgccccagtgtctctatcgttacagtatctgaattctgcaagaagtctctctccttagaatgcctggggtcagcctggagtctctctcataaaaatgtcttaagacgcacagttgcccctatcacaagaatgcctaaggtcggcataaagtctctttcattaagatgcctggagttgcacaggtgtctctgtcattagaatgcctgcagtctgccaggagtctctatccttagactgcctggggtcagccaggagtctctcatattagaatacccagggtcagttgggagtatgttcacagacagaatgtttgtagtttttacagtgggatattcggtttttcactacactcctcaatttgttcagaaatgtccctcatagattctaaaaaaaagtgtttcaaacctgttgaatcaaaaaaatggtgtaactctttgacatgaatctaaacatcagaaagcattttcacaaatagcttctttctagttttcatcatgagatatttggtttttcactatatgcctcatacagtgaaatgtcccttcgtggattctatcaaaagagtgtttcaaacgtggtgaatcaaaacacaggtttcattcaatgagatgaatccacataccataaagcattttcgcaaatagcttgtttctagcttttaacatgggaagtttggtttttctttataggcctcaatgggctcagaaatgtcccctcatagattctacaaaaagtgtgcatttatagtgttgcatggaaacaatagtttgacactgtgagataagtccacacaacacaaagcattttcccagataacttctttctaatttttattgcaggatattctgttcattactataggcctcaagggactcaaaaatgtcccttcgttcaactacaaaaagagtgtttccaacctgttgaaacaaaacaaaggtttaaatctgtgaggtgaatccacacattgcaaagcattttcacacatagcttgtttctagtttttatagcaggatattcgttttttcactataggcctcaatgtgctcagaaatgtcccttcacagattttaccaacagagcatctttaacctggtgaagtaaaacacaggttgcattcagtgagattaatatacattttcgtagataacttgtttctcatttatatcacaggatattcaattttttactataggcttcaatggtctcagaaatgtttcttcatagattctacaaaaaaagtgtttccaacccgttgaatcaaacacaggtttaactttgtgagacaaatccacacattgcaaagcattttcacagatagcttgtatctagtttttatcatgggatattcagtttttcactagagacctcaatggtctcagaaatttttttttgtagattctacaataagagtgtttccaatgtagtggatcaaaaccaggtttaactctatgagatgaaccacacgtcacaaagcattttcacatatcgcttgttttgagtttttatcatgggatattcggtttttcactacaggcctcaatgggctcagaaatatgtcattgtagattctacaaagtatgtttccaaactgttgaatcaaaacaaaagtttaactctgtgaggccaatacccacacatctcaaagcattttcacagatacctcctgcctagtttttatcacgagatattcgatttttcaacatatgactcaatgcactcagaaatgtttctttatagactgtacaaaaagagtgttcccaaccaggcaaatcaaaatacacgcttatatctgttagatgaatgcacatattacaaagcttcttcacagatagcttgtttatagttttaattctgggatattcagttttttcactagaggcctcaatgggctcagaaatgttcctacgtagattctacaaaaagggttttccaacctgttgaatcaaagcacaagtttcattctttgagatgaatagacgaatcacaaagcattttcacagaaggttgtttccagtttctattgcaggacattcggtttttcactagaggcctcaaaatgctaaaaagtatctctgtagattctacaaaaagagtgttctgaacaatgttgaatcagaacaaaggtttaactctgtgagaagaatccacacattacaaagcattttcacagatagctgctttccatttcttatcacaggaatttcgggggtttttttcccccataggtttcaatggtttcagaaatgtttcttcgtagagtctacaaaaatagtgtttttaacctgttgaattaaaacaaaggcttaattctgtgagatgaatctacaattcacaaagcatttttgcagatagcttgtttctactatgtatcacgggatattcggtttacctttataggcctaactgggctaagaaatgtccctttgtctgttcaacaaaaagagtgtttcgaacctggtgaataaaaacaaatgtttaaccctgagacactcatccacactacacaaagtattttcgcagatagattttttctaggtttattgcaggatatttagtttttcactattggcctcaatgggttcagaaatgacccttcgtagcttctataacaagagtgtttccagcctgttgaatcaaaataaagtttgaaatctgtgagatggatccatgcatcacacagcattttcacaaatagattgtttctagatattaatgcaggagattcattttttcactatagtcctcaaggggctcataaatgtttctttgtagattctaccaaaagagtgtttcacccttgttgaatcaaaacgaaggtttaactgagtgagatgaattcacccattgcaaagcattttcacagctagcttgtttctagtttttgtcatgaagtattcagttgtccactatagtgtacaatagggacaaagatatttcttcatagattcttaaaatagagtggttccaacctgttaaatcaaaacaaaggtttaattctgtgaaataaatctacacatctcaaagcatttccacggatatcttgtttctagtttttattgcaggatattcagttttttgctataatctccataggctcagaattgtcccttcgaagatactacaaaaacaagttttttaacttgttgaatcaaaacataggtttaactcagtgagacgaatccacatattgcaaagcatttacacagctgttttgtttctagtttttattgtgggatattcatttttttgctattggcctcaatgggctcagaaatgtctctttgcagattctacaaaaagaaggtttcaacttgttgaattaaaacaaagttttaactctgcaagataaatttgtacatcacaaaattatttcacagagagctggtttctgctttttattgcaagagattcacttcgcaataggcctcaacgggctcagaaatgttttttcatagattctacaaaaagagtgttcttaacctgttgatttagaacaaaggtctaactctcgatgaatccacacatcaaaactcattttcatagtttgttttatattttaaaatgggatattagctttttcactacagacttcaattggctcagaaatttttttcatagactctacaaaaagaatgtttccaaggtgttgaataaaaacaaaggttatccctgtgagatgaatgaacgtatcacacagcattttcccacagaggttgtttctatttttgctcacgggatttttgatttttcactataggcttcaatgggctttgaaatgtccctttatataatctactaaaacagtgtttccaatttgttcaatcaaaacaaaggtttaaatctgtgacatgaatccacatattgcaaagcattttcacagatagctttgtttctagattttaaggtgcattatacctttttttactgtagtttttaatggtctcagaaatgtccctttgtagattctacaaaaaaagtgtttccaacatgttgaatcaaaacaaagcttcatctctgtgagataaatccacacatcacagagcatttttgcagataacttgtttctagtttctatcccgggatatttggtatatcactatacacctcaattggctaagaaatgtcccttcatgcattccacaaaagagtgtttccaaactggtgaatcaaaacacaggttccatttggtgagataaatgcatacatcacaaaaaatgttcacagatagcttgtttccagtttttattgacggatatatggcttcttgctataggcctcaatgggctcagaaatattccttcgtagattctacaaaaagaacgtttctaacctgttaaataaaaacaaatgtttaactctgtgagattaacccacacatcgggaaccatttacacggagagcttttcttctagcttttattgcaggatatacagtttttctctacaggcctcagtgggctcagaaacgtcttttcatagattctacaaaaagagtgatttcaacctgttggttaaaaacatagttttaactttttgagataaatccatacatcacaaagcattttcacagatggcttgtttctagattttatcaccagaaattagttttttaactataggcttcaatgggctcagaaatgtccctacattttttactgtaggcctcaatgggtcagaaatgtcccttcgtagattctaccaaaaaagtgttttcaaggtgttgaattgaaacaaagatttaactctgtgaggagaagccacacattgaaaaggattttcagagatagcttgtttctagttcttatcgtggaatattcaaattttacaatatgcctcaatgggctcagaaatgtcgcttcatagatttcacaaaaagtgtttccaacctggagaatcaaaacacaggttccattgggagagatgaatccacacatcacaaaacatttttacatatagcttgtttctagtttttaatgctggatattcagtttttcactataggtctccgtgggctcagaagtgtcctttcatagattctacaaaaagactttttcctacctgttgaattaaaacatagttttaaatctgtgagataaatgctcacatcataaatcatcttcacagatagattgtttctagattttaaggaaggatattctgcttttcactataggcctcaatggcctcagaatgtcccttcatagatgctacaaaaagagtgtttccaaggtgttgaataaaaatataagtttaactctgtgagatgaatccacacatcacaaagcattttcacacagggctcacttctagtttttatcatgggatattcagtttttcactataggcctcaacggactttgaaatatctttttgtagattcaactaaaagagtgtttttatcttgttgaatcaaaaaaaaggttgaaatctgtgacatgaatgaaaatattctaaagcattttaacagatagcttgtttctaaatattaaggcaggttgtttgatttttttactatagttcttgatggtctcagaaatgtccctctgtactttctacaaaaaaaagtgtttgcagactgtcaaatcaaaataaaggtttaattctgtaagataaatccacacattgcaaagcatttttggaaatagcttttttctagcttctattatgggatattttgttcatcactataggcctcaatgggctgagaaatgtcccttcatagactctacaaaaaagtgtttccaacctggtgaatcaaaacacaggttccatttggtaagaagaatccacacaccaataagcattttgacagatagtgtttttctgtttttcttcatgggatccttgatttttcactacaggctcaaaggggctcagaaatatcctttgtagattctacaaaatgagtatttccaacctactaaatcaaagcataggttccatccagtgagatgaatccacacattgcaaagcattttcacagatatcttttctctagtttatatcacagaatgttcagttttccactataggccaaaattggttcagaaatgttccttcatagattctgcaaaaagagtgtttgcaacctgttgaatcaaaacaaagctgtaactttgtgataggaatacacacacagcaaagcatttttacagatagcttgtttctagtttttatagcagaatcctcaaatttttactataggcctcaataagctcaattatgtcccctcatagattctacaaaaagagtgtttccaacttgttaaatcaaaataaatgtttaactctgtgagataaatgcacacaacccaaagcattttcacacaagcctgtttctagattttatcactagttttctgatttttcaccacaggcctaaataggcccagaaatgttcctttgtaatttttacaaaaagtgtgctttcaacctaatgaatcaaaagaaaggtttcactctgtgagatgaatccagacatcacaaagcatttccacagatagcttgtttgtaatttttattgagggatattcaatttttcactgtaggcctcaatgaggcctacaatttttcactgtaggcctcagaaatgtgcctgcacagattctacaaaaaaagtgattccacctgtaataccaacactttgggaggccaaggcaggcagatcaggaggtcagcaaatcgagaccatcctggttaacatgctgaaaccccatcttttataaaaatacaaaaaaactgccagttgtggtggctggcacctgtattctcagctacttgtgaggctgacgcaggagaattgcttgaaccagtgagccgagattgtgccattgcatttcagcctgggtgacagagcaagaccctgtccaaaaaaaaaaaaaaaaaaagaagaagaagaagaaaagaaaagttattccaaccttttgaatcaaaacgaaggtttaattttgtgagatgaattcacccatcataaagcattttctcagataacttgtttccagtttttcttgtggaaacctcagtttttcacaacaggcctcagaaatatctcttcatacattctacaaaaagagtgtttccaacctgttaaatcaaaacaatggtttaattctgtgaaatgaatccacacattgcaaagcattttcacagataggttgtttctagtttttatcatgggatatttcgttttcaccataacccagagagggctcagaaatgtcaactcgtagattctacaaaaagcatgtttccaacctgttgaatcacaacaatggtttaactctgtgagatgaatccacacatcacaaggcattttcataagtagttcttttttgtttatttgtttttattgcaagatatttggtttttcactataggtttcaaagggctgaaaaagtccctttagagacactaaaaaatggtgtttccaacgtattgaataaaaaaaggtttaactatgaaagaaattcaccaactgcaaagcattttcacagatagcttgtttctagttttatcacaggatccttggtttatcactgtaagactcagtgggctccccaatgtctttttgtaggttctacgaaaacagtgtttccagcctgttgaatcaaaataaagtttaattctttgagatgaatccacatatcacaaagcattttcacagatagcttgtttctagtttttatcatcagatattttgtttttcactataggcttcaatgcactcagaaatgttgattcttagattctacaaaaaagcgtgttttcaaacagatgaatcaaaacaaaggtttaactctgtgagatgaatccacacatgacaaaacattttcatagatagcttgtttgtagtttttatcatgggatattcgaattttcagcatatgcctcaatgggatcagaaatattcctgcatagattctataaaaatagtgtttccaaactggtgaatcaaagcacaggtttcatttggtgagatgaatccagccaccataaatgattttcacagatagcttgtttctacttattacagtgggatattctgtttctcactataggcctaaatgggctcagaaatttcccttcatagattttacaaaaagagtgtttccaatcagttgaatcaaaacaaaggtttaactttgtgagatgaattcacacatcataaagtattttcagagataacttctttctagattataagacaggatatttgttgttgttgctttgctatagacctcaataggctcagaaatcgccctatgtaggttatagaaaaaaaagtgtgtccaacctggtgaatcaagacacaggttttatttggtgagataaacccacacatcacaaagcattttcactgataccttgtttctagtttttatcacgtaatattcggattttgccaataggcctcaaaaagttcagaaatatcccttcatagattctacaaaaagagtatttccaacctgttgaatctaaacaaacgtttaactctgtaagatggatgcacacatggaaaagcattttcacagagagcttgtttctggtttatatcgcagaatattcaatttttcaccataggcctcaataggttcagaaatatcccttcatagattctacaagaaaagtgtttccaacctgttgaatataagcaagggcataactctgaaagatgcatccacagtctcaaagcaatttcacagagagcttatttatagtttttatcacaggatattctgtttttcactctagaactcaattggctcagaaatattcctttgtagattctacaaaaagattgtttccaacctgttgaatcaaaacataggtgtaactctgtgacatgaatccatacgctgcaaggcattttcacagatagcttgtttctagtttgcatcacgtgatatttggttaatcactataggcatcaatgttcttccacaaagaatgttcttcgtgcattccacaaaaagagtgtttcaaacatggtgaatcaaaacactatttccattctgttaaatgaatccacacatccaaaacagtttcctagatagcttgttttctagattgtattatgggattcttggtttttcactgtaggcctcaatgggctcagaaatgtctttttgtaggttctacaaaaagagcgtttttaacctgttgaataaaaacaaaggtggaactctgtgagatgaatccacacatcacaaagcattttcacagacagcttgtttctagttttttttatatatatagtccttaataggctaaaaacatcccttcataggttctacaataatgtttccaacctgttgaatccatgcaaagatttatctttgtgaaacaaattcacacactaaaaaacattttaacagatcacttgtttccagtttttattataaaatatttggtttcacatgataggcctcaatgggctgagaaatgttcattcatatattctacaaatagggtgtcaaaactgtggaatcaaaataaaagtttaacactgaatccacacatcacaaagcatttttacaaatagcttctgtctactttttattgcagggtattcagtttctcactgtaggcataaatgggctcagatatgtttcttcctagattctactaaaatagtgtttcacccttgtgagtcaaaacagaggttccattcgatgagaaaaatccacacatcacaaagcattttcacagatagggtgtttctagttttatcacagaatattcagttttccactgtaggcctcaatgggctcagaaatatttctttgcagattctgcagaaagagtttccaacctggtgaatcaaaacacagggtctattcagtgagatgaatccggacattgctaagcattttcacagatagcttgtaattcgtttttattgtgagacccttggtttttcacgtcaggcttcaatgggctcagaaatgtctctttttagattgtacaaaaacagtgttttcaatctgttctatcaaaccaaaggtttaattctgtgaggtgaatccacacatcacaaaccattttcacagatggttctttccagtttccatcatgaaatcctcgttgtttcctgcccccccaccccccccacacacaaacacacacacagagtcctcattgggttcacaaagattttctcatagattctactaaaaaagtgtttccaacctgttgaaccaaaacaaaggtttaactctatgagatgcttccacacatcacaaagcattttcacagacagaaagtttttagttttaatcactggatattctgtttttcactgtaggcctcaaagggctcagaaatgtcaattcgtagtttctacaaagagagtgtttccaacctgtttaattacaacaatggtttaactctctaagatgaatgaaaacatcacaaggcattttcccagatagcttgtttctagtttttattgtgggatattctgtttggcactatacacatcaatagactcagaaatgtcttatcatagattctacaaaaaaaagtatttccatcttggtgagtcaaaaataaggtttaactctgtgagatgaatccacacatcagaaagcatattcaaagatagctcgtttctagttttttattgcaagatattccattttttactataggcctcaatgggctcagatacatcccatcgtatattctacaaaaaagtgtttccaatctggtgaaccaaaacacaggctccttttaatgagatgcatccacacatcacaaggcattttcaaagagattgtttctagtttcaactgcagaatatttgtttttttactataggcttcaatgggctcagaaatgtttctttgtagattctacaaaaagagtatttccaatatggtgaataaaaaaaaaaaaagatttaactctgtgagatgaaagaacacattgctaaatattttcacagatagcttctttctagttttcatcatgggatattcagtttttcacgataggcctcaatgagctcagaaatgtcccttcatagattctacaaaaagagttctaatttgttgagtcaaaaaaagggtttaactgtgtgagataaatttacacatggccaactattttcacagatcacttgtttctagtttattttgtgggatattcagtttttcaatataagcctcaataagctcagtaatgtcccttcgtatattcttcaaaaagattgttttcaacctactaaatcaaaacacgagtttcatttggtgagatgaattcacacatcagaaagcaccttcacatgtagcttgtttctagttttgtttgcaggatattagatttttttgctatagacctaaaggagctcagaaatttctacaaaaaagttcttcccatttattcaatcaaagcagaggtttattttcatgagatgaatttgcacatcacaaatcactttcacagataacctgttttcggtttttattgcaggaaactcagtttttcactacaagcctcaatgagctcagaaatgtcccactgtaggttttacaaaaagaaggtttccaacctggtgaatcaaaacacagattcaattcactgagataaatctccactccagaaagcattttcacagatagcatctttttactttttatcatgagacatttgattttttactattggcctcaatgaggtcagaaatgtctcttggtagatcctataaaaagagtgtctccaacctgttcaatcaaaacaaaggtttaactctgtgaaatgaattcaaacattgaaaagcattttcacagatagcttgttactagtttttatcgtgtgatatttgattttttactcttagcctcaatttgctcagaaatgtccctttgtagattctattaaaaaaaaaagtgtttcttacctggtgaatcaaaactcaggtttcagtcagtgagatgaatccatacaccacaaagcattatcacagatagcttccttctagttttcattgtgggatatttgatttttcattataggcctcaatgtgcttagaaatgtccatttgtatgttctacaaaaagagtgtttccagcctgttgaatcaaaagattgatttagctctgtgagatgaatgttcacattgcaaaccactttcacagatagcttgtttgttgtttttatcatgggatattcagtttttcactagaggcctcaatggactcagaaatgccccttcatagattctacaaaaaaagtgtttctaaccctttgaatgaaaatagagttctaactctgtgaggtgaacccacaatttacaaagcatttaatcagagagcttgtttcttgtttttatagtgggatattcagttttttactataggtttcaaaagactcagaaatgtcacccagatgtttctatcattagactgtctggggtcagtcaggagtctctcccattagaatgcctgctgttgctcaggagtctgtataattagattgcctgttgtcggccaagagtctctttcatcagaatgcttgggatcatccaggtgtctctattcataggacacctgtgttcaccagcagtctctctattagaatgcttggtgttggccaatagtttcttgaattagaaggcctggggtcacctaggtgtctctattattaaaatgctttgcctcacccacttttcttcatcattagaatgctggggttgggccaagaatctctcccattagaattcctatggtttcccaggtgtctctatcactagactgtttgtggttactaggagtctctttttagaatgcctggggtttgccaggagtctctaaaattagaatgcctggagtctcccaggtatttcaatcgtaagactgcctggggtcagccaaaactctctcccattaaaattcctgtgctcttccaggtgtttctatcattagactgcctgtggttggccaggagtctctcccattagaataccttgggtcaccaaggtgtctatataggctgcctgatttcagctggaagtctttctgattagaatctctggtgtcagctggggttctccgctattagaatgcctggggccaccctggtatctctttaattagactgcttgttgtcagccaggagtctctttaattagaatgcttggaattgcccaagcgtctgtatcattagatggcctggggccagccaggaatctctcccatcagaatgcatgaggtttgctgggaatatctaaagttagaatgcctgaggtcacttaggtgactctatcattagaatgcctggggtcagccgggagcctctcccattagaatgcctggggttgttcaagtttcactatcactaaaatgcctggggctgactggggtctctcccataaaaatacctgtggacagccagatatctctatcattagactgcctgaggtcactcaggagtctctatcatttgattgccaggggtcagccaggaatctctcccattaaaatgccttgggtcgttcaggtgtctttatcattagaatgccaggattggggggcctctctaataaaaatacctggggtcgctgaggtgtctttatcattaggctgcctagggttgccaagatgtctttatcattagaattcctgagttcagccaaaattctctcccattagaatgcctgtggttgcccaaatgtctttatcattaaaatgcttggggttggccaggagtctctcccattagaatgcctatgatcacccgggtggctctatcattagactatctgaagtcggccagtagtctctttcatcagaatgtttgggtggcccaggtgtctctatcattagactgcctggagttggtctggattctctccagttagaatgcctgggttcgctcagctgtctctatcactagaatgcctggggtcatgcaggagtctcttctattagaaagtttggggtagcccaactgtctttatcattagactgcctggggttggccaggagtctctctcattagaatgcctggagtcacccaaaaatctgtataattagactgcctggggttggccaggagccttttcctttggaatgcttggggtcacccaggtgtctctatcattagactgcctgggtttggcagaacgtctctcccattagaatgcctgtggtcatgaaggagtctctatctttagactgcctggggtcagacaagattctctcccataagaatcactgggtttggccaggaccctctcctatcagaatgcctgaagctgcctagatgtctccatcattagactgcttcgggttaaatgggaaattctcccattagaatgcctgggttcacccaggtgtttctatcattagactgcctgggtttggccaggtgtctctttcatcagaatgcctggtgctggccaggagtctctcttatttgagtgcctggtgtcgtggaggtgtctatatcattacaatgcctggggccactcaggtgtctctatcattaaaaagcctcaagttgaccaggagtttctctcattagaatgtctgtgttcacccagttgtctctatcattagactgcctggggtcggccgggagtgtctgtcattagaatgcctgcagtcgcccaaatgtctccgtcatcagacttcctggagtcagcagggagtctctaccattagaatgcctgaggtctctcaggtgtctctataattagattacctggggtcagccaggaatctctcccattagaatgcctggagtttcccaggtgtctctatgcatagactgcctctttcagccagaagtctctcccagtagaatgcctgggttctgctgggagtctccccttttagaacgcctgaagacacccaggtgtctctttaattagactgcctggggtcagccaggggtctcttccattagaatgcctgtgctcgtcaaggtgtctctatcaataaactgcctgcagtttgccaaaagtctctcacattagaatgcctggggtcaagcaggtgtctctgttattagcaagctttgggttggccaggagcctctcctattaaaatgcctggagttgagcagaagtgtctcccattagaatgcatgtggtcgcccatttgtctctatcaatagactgcctgaaattagacatgggtctctcccactagaatgcctggggtcgcacaggtatctcaatcattagatttttggggttggctgagagtctctcccattagaacaccttcggtcacccaggtgtttgtttcattagactgcctggtattggctgggagtctctcccattaaaatgtctggggtctcccaggtgtctctatcaatagactgcttgggtccgtcagaagtctctcccattaaaatgccttgggttggatgggagtctctattattagaatacctttgattgcccaggtgtctcttatcagattgccttaggtcagctaggagtctctctcattagaatgcctgtggtagcccaagtttcactttcattagactgcctatggccggccaaacttctttcacattagaatgcctgggatcgccagctgtctctatcattagactgcctgtggtcagccaaaagtctcccattaaaatgcctggggtcccctaagtgtctctatcattaaactgcctgggttcgttatggagtctctcttattagaatgcctggagttacccaggtttctctatccttagactgcctgaagtttgacaagagtctctcccattagaatcactggggttcaccaggagtctctcacattagaatcctttgcattgcccagatgtctctatcattacaatgattggggtggcccacttgtcttcatcattagaatgctggggttcagccaggagtctctctgattagaatgcctaggtttgcctggggtcacttagttgtcccttatcttgactgccttggttgcccaggtgtctctatcattagactgcctggagttgcacaggtatctctatcattagaatgcctggggtggtccaagattctttcccattagaatgcctggggtcacccaagtgtctctaacatcatagtatctggtgtcaactgggaatctctttcattagaatatttggggtcgcccaggtgtctctatcattagactgccttgggtagccaggagtctctcccattagaaggcctgagtttgcccaggtgtctctatcattagactgcctgggatcatcctaatatctacctcattagaatgcctggtgtcagccaagattctctcccatttgagtgcttagagtagcataaatgtctctatcatgacaatgcctggggcatccaggtttctttctcattacaatgacttgagacgaccagtattctatcccattagaatgcctgtggtctccaggtgtctctattgtaatactgcctggggtcagatgaaagtgtctcccattaaaatgtctggggttgctcaggtgtctctattattagacagcctggggtaggccagaagtctcctccatttgaatttctgtggttgtccagtgtctctatcattagacagcctgtggtctcccaggagtctctccatcagaatgcctggtaatgaccaaaagtctttcacattagagtgcctggggttgcccaggtgtgtctaccattaaaatacttgaggttgcccagttgtctctatcattagaacaccaagattctgtgggaagtctctcccattagaatgcctaggtttgcccaggtgtttctatcattagactgccttgtgtcatccgggagtctctcccattagaatgactggggtcgccaatgtgtctctatcattagaattcctggggttggctgggggtctctcctgtaagaatggctggggtcacccaggtctctctaacattagactgcctggttttgcacaggtgtccctaagattagaatgcctaggatcgtcagggagtctcaaccaatagaatgcccatggtcacccaagtgtctctatcattagactgcctagggtcagcttagagtctctcccattagaatgtgtggggtcacccaggagtctatataattgaactgcctgagtttgaccaggagtctgtctcattagaatgcctgggatcactaaggagtctctatttctagattgccaggggtcggacgaaagtctctcattagaattaatggggttgcccaggtgtctctataattagactatctgggttaggccaggaatctttcccattagaatgcctggggtcgtttaggtgtctctatgcgtagactgcctggagttggccaggattcactcccattagaatgccttctgtcacctgaaagtctctcctattagaatgcttgggggcacccaggggtctttttaattagactgcctggggtcgtccaggactccttctcattacaatgcctctggtcgcccagttgtccctatcaatagactgcctggggttggcctggagtctcttccattaaaatgcctggggtcacccaggtacctctataattagattgcttggggccatccaggtttctctttcattgggatgcctgtgattgcccatgtttctctaaaattagactgcctggggtcggccagtagtctctcccattagaatgcctggggtcacccaggtttctctataattagactgtgtggggtccaccaggaatctctcccattagaatgcctgtggtcacccaggtgtctcatcaacagactgcatgggtcagccacgagtctctcccattagaaagtctggtgtcagctaggagtctcttttatttgaatgcctggggtcattcacctgtctttttaattcgactgcctgaggtcacttaggaatctcttccattacaatgcctgaggtcgcccaggttgcactttaattagactgtctggggttggccaggagtctcttttattagaatgcctgtggtcaccgaggtgtctctatcattagactgcctgtggtcagccaggtgtctctccattagaatgcctgagtttagccaggagtctctcacattagaatgcccgtggtcacccaagtgtctctattattaaaatgcttggggccacccacgtgcccctatcattagcatgccagggttcagcctggagtgtctcccattagaatgcctgaggtcgcccaggtgtctctatcattattctgtctggtgttggcttgggtgtctctcccattaaaatacctagtttcatccaggtgcctctatcattagaatgcctgtggttggctggaggtctctcccataagaatgactgtggttgcccagttctctctatcattagactgcctggggtcacagaggtgtctctattattagaatgcctaaagtcttttgggagtctctctcattagaatgcctagagtagcccaagtgtctttatcatcacactgcctggggttggttgggagtctctttcattagaatgcctggggtgtcccaggagtctgtataattagactgactggggtcaggaaggagtctctcccattaaaatgcctggggtagaccaagtgtctctatcattagactgcctaggtactgccaggagtatctcacattagaatgcctggattggaccaggagtctatccctagactgcctgaagtcgaataatagtctctcaccttagaatgactgaggtagccagaagtctctccaattagaatggctgggttcgcccaggtatatttatcattagactgcctggatcttcctggagtctctctcattagaatgcctggtgtcagtcaagagtctctcccatttgaatacctggggtcacacagatgtctctatcattacaatgcctggggtcacccaggtgtctctataattacaatacctcgggacgatcggtagtctctcttattagaatgccttcggtcaccaggtgtctctatcataatactgcctggggtcacacaggagtatctcttattagaatgcctggggttgcccaggtgtttctatcattagactgcctggagtcagctagaaatcttccccattagagtgcttggggtcacccatgtgtctctacccatagactgcttgggtcagccaagagtctctcccaggtttctctctcattagactgcctggtgtcagacaggagtctctctcaatcgaatgcctggtgtcaacggaaagtttctcccattagagtgcctgggttctcacaggtgtctctatcattgcaatgcctgggttgcccatgtgtccctatcattagaaagcctcatgtctgccaagagtctcccgcattagaatgcctgcaatcgcccaggtgtctctattattagatttcctagggctggccaggaatctatcccattagaatgcctggggtcccttaggtgtctctatgcatagattgcctggtgtaggccacgagtcacttccattagaatgccttgggccggctaagtctctcctactagaatgcctcaggtcacccagtggtcattttaattagactgcctggggtcgtccaagagtcgttattattagagtgtgtgtggtcacccagaggtccctatcaatggactccctgggttcagccaggagtctctcccattagcatgcctggggccacccacctttcacttcaattagactgcctgtggttggccaaaagtctctcacattagaatgcctggggccacccagggttttctatcattagactgcatgtggtcagccaaaagtttctcccattaaaattcctgaggtcccccaagtgtctctattattagactgcctgggttcggctgggagtctcatattagaatgcctacagtcacccaaatttccctatccttagactgcctgaagccagacaagagtttctcccattagaatcgctggagcttgccaggagtctctcacattagaatgtctggggtcactcaggtgtctctatcattaaaatgattggggtggcccacttgtccccatcattagattgtcagggtttggccaggagtctgattaaaatgccttgggtcgcctgggagtctcttttattagaaagcgtggggtcgcttaggtgtctcttatttagactgcctggggtttcccaggtgtctctatcattagactgcctggggttgcacaggtatccctatcactagaatgcctgcggtggtctgagagtctttcccataagaacacctggggtcacccaagtgtctctttcatcacactgactggtgttgtctgggagtatctttcattagtgtctctaacattagattgcctggggtcgttggggagtctcctccattagaatgacttgggtggcccaagtacctctatttttagactgcctggggtgggctgagagtctctcctattagaatgcttgtggtcgcccaggagtctgtataattgagcttcctgggttcgaccagggctctctcccattagaatgcctggggtcgcccaggagtctctatccttagactttcagatgtcagatgaaagtctctttcattagaatgcctggggtcgccaaagtgtctctataattagactgtctgggttcggccaggtatgtatttcattagaatgcctggggtcgcttaggtggtctgtatgcatagactgcttggagtcaaacaggagtcactcccaatagaatgctttcggtcagccgaaagactctcctattagaatgcctggtggcacccaggggtctttaattatactgcctgaggtcgtccaggcgtctttctcattacaatgcctagggtcacccagatgcctctatcattagactgtctgtggtcatccaggagtctctttcactgaaatgcctgcggttgcctatttgtctctatcattagactgcctggggtcagcctagcaataaatgaaagtttaagctatactaaacccagggttggttaatttcatgccagccactgcggccattagtctctcccattagaatgcctggggtcacccaagtttctctataattagactgtgtgaggtcagccaggaatctctcccattagaatgcctccagtcacccaggtgtctctatcaacagactgcttgggtcagccaggagtgtctcccattagaatgccttgggtcagctaggattctctcttatttgaatgcctggggtcgcccaggtgtctttttaataaaactgcatgcagttggccaggagtctctcccattagaatgccaggagttgcccatttgtcactttaattagactgcgtttagtcggccaggagtctctcctattaaaatgcctgtggtagtccaggtatgtctatcattagactgcctgtgcttagccaggaatctctccattagaatgtctgaggttagccctgagtctgtaacattagaatacctgtggttgcccaggtgtctctatcattgaaatgcttggggttgcccacttgtctctatcattagaatgcctggggtgggccagaaatctctctcattagaatgcctgttgtcacccaagtctctatccatagactgcttgggttggccaggagtctctcccattaaaatgtctgggtctcccagtttctctatcattagactgtctagggatgactggaagtctctcccattagaatacctgggttgcccacgtgtctctattgttagactgcctggcatcagacaggagtctctcattagaatgtctgatgtcaaccaaaattctctcccattagaatgcctggggtctcactggtgcctaaataattacaatgcctggggtctcccaggtttctctatcattagaatgcctcgggttggcagagagtctcttgcattagaatgcctgcaatcgcccagttgtctctatccatagactgcctggggtcaaccgtaagactctcccattataatgcctggaatcgcccaggtgtccctatgcatagaccgtctggggtcggccaggaatctctcttattagaatgcctgaggtcgcccaggtgtctctatcaataaactgccagaagtctcccccattagaatgtctgagattgggtaggagtctctcttattttaatgcctggggtcacccaggtgtctatttaattagactgactggggtcggccaggggtctctcccattagaatgcctgggatcacccaggtatctctatcattagactgcctatgcttagccagttgtctctccattagaatgccagaggttggccaggagcctctcacattagaattcctatggtcactcaggtgtctttatcctgaaaatgattggagccacccacttgtctctatcatttgaatgccaaggtttggcctcgagtctctcctattagaatgcctggggctgcctaggtgagtctgtcattatactgtctggggttgtttgggagtctcttccattaaaatgcctggtgtcacccaggtgtctctatctttaggatgcctgtggtcggctgggggtctctctcattagaatgcctggtgtcagccaagaataactcccatctgagtgcctggggtccacaggagtctctatcattgaaatgcctggggtcacccaggtgtctctgtcattacaataccttgggacgaccagtagtagtctcttccattaaaatgcatggggtcaccaacttgtcactttaattagactgcatggggttggcaagcagtcgctcccattagaatgcctgcggtcaccggtcaccaaggtgtctctatcattagactgccttgggttggttgggagtctctcccattataatgcctggtgttgcccaggtgtctctatcattagactgcctggggttagataatattctcttcattagaatgcttgggtttgcccaactgtctttaatatttgaccacctggggtcggccaaaagtctcccttattagaatgcctggtgtcagctgggagtctttctcatttgagtgcctggggtcgcacaggtgtttctatcattaaaatgcctcaggtcgcccaggtgtctctattattaaaatgcctcgggatgactgagagtctctcccattagaatgcctgtggttgcccaggtgtctcaatcataagactgcctgaggtcagatgggagtctctcccattagaatgcctggggtcacttaggtgtctctatcattagactgcctgagttcggccaggaggcttttccattagaatatctgggatccgccggcaatctttcccattagaatgtctgggttttgccaaaagtttatcccattagattgtctggaatcacccaggtgtctatatcaccagactacctggtcgactggaagtttctcacattagaatgccttgggtcgcccaggtgtctctatcattagactgcctggggtcagctgggagtgtctcccattagaatggctgaggtctcccatgtgtctctataattagacagcctgcctggggtcagccatgagtctcaaaaaaaaaaaaaaaacccatggctaccccaggtttctttatccttagactgcctagattcagccaggagtctctttcattagaatgtctgttgttgcccagatgtctctactcttagactgcctaggttccatcaggggtatctcccattagaatgtcttgggtcagccagggtctctccctttaaaatgcctggggttcatcaggggtccctcccaatagaatgtgttgggtaacctgggagtttctccttttaaaatgcgtggagtcccccaggtgtctctatcattagaatgcctgggctcaaccacgggtgtttccaataagaatgcctgtggcctcccagtgtctccatcattagattgcctgcagtcagccagggttctctcccattagaatgcctggggttgcccatgtgtctcaataattagactgcttgcaatcagcaagaagtctctcccaagagaatgcctggggttgagttggagtctctcccaataggaaggctgtgttctcccaggtgtcactattattagaatgcctggggtcagctagaagactctcacattagaatgtctggtctcaccgaggtgtctctatcattagacggcctctggttggctggtagtttctcctattagaatgcctgggatcatctggatgtctttaccattagactgcctggggttggccaggagtctctcccatttgaatgcctggggtcggctgggagtctctcccattagaatacctggggttgtccaggtgtctctatcattagactgccggggttggcctggagtctttcccattagaatgcctggagtcgcccaagtttctctgagactgcctggggttggccaggagtctctcccactagaatgttcagccaggagtctctttcattagaatgcctggggttgcccaggtgcctctatcattagactgcctggattcagccaggagtctctcccattagaatgcctgctgtcactcgtgtggctctattattagactgctggggttggcctggaatctctcccatttgaatgcctggggttgccaagatgtctctatccatagactgcttgggtcggcaaggagtctctcccgttagaatgcctttagtcggctgggagtctctcccattagaatgtttagttaagcccatgtttcactttattagactgcctggggtcacccaggagtctctcccattagaatgcctgggttgcccaggtttctctatcattagactgcctgtggtcagccaggagtctctccattagaatgcctggggttggccaggagtctctcacattagaatgcctgtggtcgcccagttgtctctatcattaaaatgcttgggtttgcccagttgtttctaccaacagaatgccagggtttgtcccagagcctctcccattagtgtaggggttcagtcaagatgctggggaaaactataaaacacaaacattcttggaaggccagggggttttgtatagcttcaaatactttgtctgaaggtggcctaatcctctttgaactatagcaagggtaattaatataggaacatagagtagttaacctaaatagcttgtttacttatgtggtcctaaaactaacctctgatcatccactggtgcatgattgctctctactcgggggttcagcaacaataattaccttctagtggtgtttacctgagacttctgtcattaaatgtgtgctaaataaatgccgggagggccaacaagtcagagccgtggctgacaggactcttcttggagtctgtaagtggcctggatgctcagcaggactgacaagcataagatctgtgtcagtgtacattattcatccgtcgttgagtcagggtctgcaggacaaacccccgcaggtggtgaccccgacatgatcaaggcagtgaaggaagcgcgatggacaccctgaaaacgaaggtgaaaaaggaaccttgtcatcagcgagcaatcagtaagtcattggtgcccactcaggatctccaagttcaggggagattgttcaggctgaggtttcatcatgagacaacagttatcagctcaacagaaacagtacataaaagtgttgaaacagctgcttaaggctagtggagcctcagttttgcaggctcaattaaatgacctaatgcaaactgttataagccaaagcctatggttcccagaaaaaggcacgctagacataaagctctcggaacaagtggggagaaatcttaaacagcattatgcacaagggcaatgagtcccagtaacacctctagcgctatgggctgtaattaggctggaccaggctccattatacacagaagagcctaaaaaggggaaggaggaaccgtaacctgcgttaccacctccttttccttcagcccggatatatcaccgggccagaataacaaaaaggaaacggggtttttcctgagccacctcctccaagagataggaaaaaggacaggagacacgctacacctatgagaccctgtctaatcaagcggcattagaaggggagcttttagcctgcctggtaatgcaaggtcagcaaggcaatcaggtacctaaagggttaagaaaaagcattagaggccagagtgctgcggtcaagcatgcagtaaatagaaagcaaacactgccagcaaatgctccccaaaacttggcctgcgtagcagctgtgttgacgaaaagccaggtccagtgcaccagagcggcctgctactgaggggcagaaggtgtgcgcgggaaggctcacccaacctgcagcagccacccggtggcgggaggagggagcggcacacgcagaaagaagcggtgcagacaagaagcggcagggcctgagcaagcacatcgcagccgctgcccccggacctgcccgctcagctctacagctccgcaggcggcccacgacaaaatttcatgtgtttattgtatacagagacgtcccaaattataattctctgctaagatttaagtaaaatttaagaatttaaaagacctctttctgataatagccactgttatctcttgcttgcccctagcgtgactctctccacatctaattaaaataaaactgtaacctctgaatgagagaaattacagagggcccatgaattagttggagagcaattgaaagctgggcatgttgaattatctagcagcccttagaattcacccattttcatcattccccaaaagtctgggaaatggtaactttttcatgacctacgtgctattaatgccaatttgcaacctgtgggaccccttcagcaggggctcctttcgcccagggcaattcctcaagattgcctataattgttattgacataagacattcttttatatgattcccctagcaggacagagaaaaaattgcgtttacaataccagctatcaataacgaaaagtcagcttgttgatttcattggaaaatccttcctcaaggaatgctaaacagtcccaccacgtgtcagtatcatgtaaatcaagctttgctcccaagtagaaaagaatttcctgattgcacaaatattcattttgtggatgatattctactagaagctccaaaggagccaatattttaaatttatattcctctgtcataaagaatacacagctaagaggtctaatcattgcacctgggaaagtacagatttcttctccttggaaatatgttgggtacatactaactgcctggtgagtaaaacctcagaagtttaaattaaataccagcaacttacataccttaaatgattatcaaaaattactgagagatattaaatggcttcaacccacttcgggaattcctactgataagctatacaacctgttttctatcttaaagggcaatccagccctggattctcccagatatttaacccctgcagcagaaagggaaatcgaggaaatagagcaagccacctctcagaggcagctaaatcgcattgattcaccttattcaattaaattgtttatctttcccaccaaacactcccctacagggttaatagggcaaatagcccccaggccacacttcctagaatgggttttttgctcacataccgggactaaaacgctatctccctatattcagttcattactaaagtcatctattcaggctgcaaacgatgcaatcagctgctaggttatgatcctgatatcatcaggattcctttaagtaaaaagcaatttgaagcagtattgcgcttatcaatatatctgcaaatagctttctctgattacacaggacaaatagagcatgaacttcctgctaataaacttcttcatttcttatctcatatgccagtaatcttgcccacaaaaatagtttactcccccatacctaatgctttaacactatttactgatggttcctgtaaacatggaaaagtgacagtctggtggagaccacatcattcagtcactcaatctgggcttactagcactcagagagctgaaatggggccctgatactggtcttggaaactttttccactcagcctatcaatatagtgagtgactcagcttactttgtttatttattgcagaaccttaaaacagccttaattaaatccaatcttgagcccatcctgtgtgctctttttcttcaacttcagcaattactagatctaagtacacatcctatttttatcacatgcattggagcccacagctctcttcctggcccattgacttatgaaaatgaacaagttggccaggcgtggtgaatcacgcctgtaatcccagcactttgggaggccgaagcaggcggatcacgaggtcaggagatcgagaccatggtgaaaccccatctctactaagaaaaaaataataataataatacaaaaaaaattagctgggcacggtggcggatgcctgtagtcccagctactcgggaggctgaggcaggagaatggcatgaacccgggaggtggggcttgcagtgagctgggatagtgccactgcactccagcgtgggtgacagagcaagactctgtctcaaaaaaaaaaaaaaaagaaaaagaaaattaacaagttgatccagaagtcatgacatcactgcttgaccaagccaccaaatcgcatcaatttttccaccaaaattggagaaatttatctaaacaatttcaacttacccagagactggctaaacaaattatcctgcaatgcctggattgtcagctcacaagcacatcccctccttccacaggtattaacttttgaggactagaaccccaacactcacttaattagtgcacatgctctgcctggaaagtcaactcgatatgtcattaaacatattttaacttttgcatttatgggactgcccaccaaaattaaaactgataatggtccagcttatgccagctcacaatttcaacaattttgtcacacatggaatatccaatattccacacgcatcccatatatggacaagccatagtagaacgtgcccactccatcattaaaaatatgctcaaaaaacagaaaagagggagtatgggtaaagttcttgtaatgttattggcacaagtcttatttactcttaagttttaaaatttagatgacaaagttcaatcagctgcagaaaagcactttgcaataacctcagaagacataaaacctgcagttttatgggaagatgtaaacagaaacgaatggtatggtccaaatgaattgttaacgtggggaagagggtatgcttgtttttccacaccctcaggtcctctttggattccagcacaatgcattaaaccataccatggtgtggctaggacacaacccagtaccagaaatggagaaaattgcctggcttagcttctgagatcagacagaaacatattggctaaagttaaaaaaggtatcgtccagtttttttgtaaaccagacttcaaaataaagcacaacaggtttttcttaaagcactaacctgctctttaacaaagattataaaaggtctcttagcacaggcaccacccctagaatttccagtacactagcacgagcctggagactacgtcctcatcaaatgatggaaagaagaaaaaacccgagccagtctaaaaaagaccctacaggacctgcagccccagacgatgcagcttccatggatgatgcaggccccagacattatgctgaagaggcataaggctaagccaaataatttattcctttttaattctctcactctgcctgcaaccagtacttgctacactctattaagctcatctctgaaatccacccttttttatgccctgttacttaacaaacacccccttcagagcttctaacagtgagactgcttggctaaaagaaattaacattctcccggtggggttcctcattgatggcatagagtgaactgagatgccaagtaacactatgggtcactctttgactggaaaataatgttgctaattataatcatgattacattatgtgatttgctaattctaggatgcaaagccggaataaaagcaatggctgccatgccttacaaacctgttgctgcatacatctgcattctccaatcaaaaagacctaatgcagaaaacagaaaagggggagatgcagggtttcagtcaggataggtgggaaaattataaaacataaaccttcttggaaggccaggggggtttgcatagcttcagatagctttgctgaagatggcctaatcctctttgaactatagcaagggtaactaacataggaatgtagagtagtttatctaaatagcttgtttactcatatggttctaaaactaacctctgaccatccgcgggtgcatgattgctctctactctgtggctcagcaacagtaattaccttctagtggtgtttacttgggacttctgtcattgaatgtgtgctaaataaatgctgggagggccaatgagtcggggctgtggctgacaggactctccttggagtccgtaaatggcccagacatttggcaggactgacaagcataagatctgtgtcagtgtatgttatttattcgttgttgagtcagggtctgcaggacagaccccagcatattagaatgcctggggtcacccaagtttctttatcattagactgcctgggttcgggcaggagtcttttattaaaatgcctcagttggccaggtgtctctatcattagactgcctggggtagcacaggtgtctctatcattaggatgcctggggttgtccaggagtctttcctattagaatgcctggggttgcccaggtgtctctatcatcacactgcctagggttggccacaagtctcttctattagaatgcctaaggtcgcccaggagtctatataattagactccctggcgttggccagaagtctctctcattagaatgcctgagatcacccagatgtctctatccttagactgcctggacttggccaggagtctttcttaataaaatgcctggagtcatccaggagtatttatccttagactgcatggggtcagagaaaagtctctctcgctagattcactggagtttgccgggagtccctcctattataatgcctgttgttgctcccagctgtttttaacatttgaccacgtggggtaggccaggagtctctctcattagaattcctagtgtcagctgggagtctctcccatttgagtgtctggggtcgcccaggtgtccctttcattacaatgcctcagggggaccaggagtctctcccattagaatgcatgtggtcgcccaggtgtctctattataagactgcctggggtcggatgagagactctcccattagaatgccaggggttgcttaggtgtccctattattagactgtctggtgttggctgggagtctctcatattagaatgcctgggattacccaggagtctctacccttaaagtaatggaaattgatgaggggtatctcattagaatgcctgggatcagcgagaagtctctcccattagaatacctgaagtcacccaggttttttataattagacttccaggggtcagccaggaatctcacccattactatgcctggggtcccccaggtgtctctatgcatgcttgtttcagccagaagtctctcccagtacaatgcctttggtcggctgaaagtctctcctattagaatgcctttggtctcccagatgtctctttaattaggcagcctttggtcagccaggagactttcccattaggatgcctgcagtctcccaggtatcactgtcattagaatgctaggggttggccaggagtctctcccattagtatgtcttgggtcactcagctgtctctctcattagactgtctgtggtcagccaggaatctctattagaatgccttgggtcacccaggtgtatttatcaatagactgcctggggttggaccggagtctctcccattgaaatgcctgaggtcagaggggaatatcttcctttagaatgcctgtgtttgcccagtagtctctatcaatagactgcctgtggtcagccgggtgtctctcccattagaattcctgcagtcacccaggtgtctctgtcattacactccccggggtcagccggaaatctctcccattagaatgcctggggtcacccaggtgtctctatagttagactgcctggcatcggccaaaattctctctcactaaaatgcctgtggacacccagttgtctctatccctagactgctttcttcagccaggagtctcttacatttgaatgcctgtggtcgactgggagtctctgctgttagaatgcctggggtctcccagctgtctctcattagactgcctggggtcagccaggattctctccattagaatgcctgctgttgtgaagtgtctctatcactagattgcctggaatcgcccaggtgtctctatcattagaatgcctagagtcagccagcagtctctttcattagaattcctgggttggccaggagtctctcacattagaaggcctggggtcactaaggtgtctctatcattaaaatgcttggggtcacccacttttctctatcattagaatggctgggctaggccaggagtctctcccattagaatgcctggcattgcccaggtgtctttatcatttgactgcctcggttggaccaggtttatctatcattggaatccttgggttcatccaggagtctctcccatgagaatgcctggggtcagccgggactctctactactagaatgcctgaggtcgcccataagtctctatcattaaatggcctagagtcgaccaggaatctttctcattagaatggctgcagttgccctggtgactctatcattagactgactggggttggccaggaatctctcccattaaaatgcctggggttgcccaagtgtctttattgttagactccctgtgattgtcccggagtctctgccattataatgccatgggttggccaggtttctctcccattagaacacctggtgttgcccaggtgtctctatcattagaatgcctgggctcaccctggagtctctttcattagaatgtctgggatcagccggcagaatttttcaatagaatgtctgggttttgccaaaagtctctcccattagattgtctggaattgcacaggtgtctagatcataagactacctgggtcacccagaagtctctcacattagaatgccttgggttccccatgtgtctctatcattagactgcctggggtcagccaggaatctctcccatcagaatgcctggggtctcccatgtgtctatataattagacagcatgaggtcaagaaggagtccctctcaaaagaaatgccttgggtcacccaggtttctttctccctagactgcctggatccagccagtagtctctttcattagaatgcctgtttttacccaggtgtctctatttttagactccatggggccggtcagctgtctctcccattagaatgtcttaggtcggccaagagtctctccctttaaaatgcctggggtcgctcaagtttttctatcattagaatgcctaaggtcggctgacagtctctcccattaaaatgcctggatttgcccaactaagtttggcatcggatctctcttacaagaatgcctgtggtcgcccaggtgtttctatcattagactgcctgtggtcagccaggggtctctcccattagaatgcctgggattgcccatatgtctcaataattagactgcctgcgatcagcaaggagtctctttcaagagaatgccttgtgttgagtgggagtctttcctattagaatgactgggatctcccaggtgtctctatcattagaatgcctggggtcagctgggagtctctcctattagaatacctgggctcgcgaaggtgtctctatcattagacagcctgaggttggctggtagtttgtttcattagaatgcctggggtggtccggatttctttacaattagactgcctggggtcagccaggagcctctcccatttgaatgcctggggtcagcagggagtctctcccattaaaatgcctggagtcacccaggcgtctctctcattagactgcctggggttagcctggagtctttcccgttagaatgcctggggtctcccaggtatctctatcattaaactgcttggggtcggccaggaatctccctcattagaatgcctgaagttgaccaagtgtctcccccattagaatgcctgttgtcacccaggtgtctctatcatcaaactgcctgggttcagccaggagtctctcttattagaatgcatggggtcgcctacatggagccattgaaaggaacaacacccttgatgcagaagatttagcaccactatctctgttccatctgggcttatatgtacttttactttttggtggtgaaattggctgatgattttcctttttcttccctggactattgtgccaactgccaggctgcctcctgcccttacagccctaaatggctgccttctttccatcaactcccaacttcttccagtgaaatttaattgtctcaatgcctccccctcccccattctctccattttctcccaagaagcatgactcgattatttgcatattttgagaaactgctgcagattagttctttttgccagttctccctggaactcctggccttttgtggagggaaggatggacagaatgggaatcttcactagaagccgtgggaagaattgcaagttacatgctctatatgcaatgtccagcagtctgataaactgatgattcttaatcaagattgttttcctggtggggaaggggcttttattttcttttagagaggggaaagtgtgagctcttcccttattcctaatggctatttttgaagcaaagaaggctagcaacgttggcacatgccacctggcaaaggacccttgagtaagtgaaggtctcctagaactgggattaagaaaccttgctgtcctcacctccaaggcagggaccatcaagaacctacagactccatctcttctgcaagcctcatgccaagcctgggctattgctgctgccccttaaacagaggctgtccttaacccacctctcctgccctgtgatatgtctgttgagttggcctggccatgtccaagaggctgtagaaaggggagaatgtcaaggaagacttttggttgagaaggagcagaaagatgtgtttttgcaaagaagaagacctctaggaagagctagtaggaatgtacatgaagaaattaagtctgaaactggcttcctcactcccctgtttctccttttcctatccttataggcctgtcccttgcctctgccctggattggctggcacactaaaggacttgatgtacataactcctgtcccttttacccttacaaggtgcggattgcccctggctttgcctcttctttgtgcctttggcctggggtgcatttccacccacccttccatgtgcctttctttgcctctgcagtctcatttctcataattttgcaaattacattttgttgctttcttacctactattggccctaaatagcagaaagaagagaagtgacctagagaacctcagattcttcattgaggattggtatagccatgatttcagccatagcaagttttgctcaacagcatatgcgtgggattttgcaaaactcctattctgatgaatcacaaagtaaggttggtaagagaagtgagtggtgtgactcttactccttaggtgcccagaacttaccatcatctctgaaggcgttacagggaagtggtctctccaatccttccctccctccagtattgccccctctcactttagcatatattaattagcaggttgggctagagaaatcagctgctatgcgggttgattattattattatttttgatccttttccttatttgccttctactccccttaatctaatctaaaagctctgttccatgtaactggagttctttatccctctcttccccttcccttatatattgaggctatggggtaggagaaaagtgcacaacccaccaccccctttactggtgcattaaaatttcttatttacccttttctcccttcccatttctccccactttcatctaccttttctggcaaaaaggagccttgtgctctctgtgaccctaagggcacactgcacaggtgaaattgccccatccagacctggctccactcttgatttctcttgccctcttctgctcttttcctggtgctcttttttctttttttcttttttttttttttttgtcttccagaactgctatatatatatatacacacatatatatttaattttattattattatactttaagttttagggtacatgtgcacaacgtgcaggtttgttacatacgtatacatgtgccatgttggtgtgctgcacccattaactcgtcatttagcattaggtatatctcctaatgctatccctgccccctcccttctcagtggggtatgggtaataggatagccatgggcttttggggacctttaacttttttttcctcttttgtttataaaaacactaaacattcaattccagagaaccaaaaatcccaccttcccaccgaacactgctaacgggcttgtgttctgctccatactttttctcttttctttctgtcttgttaatgcttttaaaaacaaatgagtttttatataaataaagtatttaaagtgtgaaaaaaaaagaatgcatggggtcatctacatgtcttttttattagactgtctggtgttggccagtagtccctcccataagaatgcctggggtcgaacaagtgtctctcccatgaaaatggctgggatcactcaggcttttcttttattacaatgcctggggtcagccgggagtttttcccgctagaatgcttgtcgcccaattgtctctagcattagactgcctgagtttggcaaagtgtgtctctcataataatgcctgtggtcgtcaaggtgtctctatcattagactgcctggggacactggggaggtatctcccattagaatgcctaggcttgcccaggtgtctttataattagactgtctgggttcagccaggattatctcccaagacaatgcctgggttcagaagagagtctttcctattagaatgactggaatcgccaaggtgtctctattattagaatgtctgtggtcaccaagagtctctccttttaaaatgcttaggctcacgcaggtgtctgtatcattaaaaaatctggggactgtcaatagtctctccctttagaatacgggggtggccaaggtgtctctatcattagactgcctggggtcggccagcagtctctcccattagaatgtctggggccagccaaaagtttctcccattagaatacatgaggtttcccaggtgtctctatcattagattgctcggggccggctgggagtctctcccactgaaatgtctaaagtcacccaggtgtctctattattagattgtctgtgcctgtggttgcccggtagtctcttttattaaaatccttttggtcactccagtgtctctatcattagactgcctgagatcggctgagagtctctctcattagaatgcctgggtccgcagggagtctctttcattagaatgcctgaaatcgcccacatgtctgtatcattacaatgcctggggttgcccaggtgtctctgtcattagaatgcctggaataggcaaggagcatctctcattagaatgcctgggttcactcagatgtctctatcattaggcagcatggggtcggccaagaatctttcccattagaatgcctggggtcgtccaagtgtctctatcattaggtggcatggggcccgccaggagtttctcccattagaatgagtttggtcgctcacgtgtcctataattagactgcctgggtttggcccagactctctcccattagaatgtgtggggttgccccgcagtctctatacttagactgcctgaagtcggacaagtgtctcttttactagaatgactggggttcgctgggagtctctttgattagaatgaatcaggtctccacgttgtctctctcattagactgcctgtggttagccgatactctattagaacgcctggggtcgcccagctgtctctatcattagactgcctgggattggatgggggtctctcccattacaatgcctgaagtcaaccaggtatttctatcattagactgcctggagtcaaacgggagtcactttcagtagaatgcctgggatagcccaagtgtctctgtaattagactgtctggtgtcggtcaggagtctctcccgttagaatgtctgggatcacccgggtgtctctatccttaaatttccttgggtcagtcaggattctctccaattaaaatgcctgtggtcagccattagcctctcccattagaatgcctgtagttgcccagttgtcactatcagactgcctagaatctctccaatcagaatactgggttcgcccaagtttctctatcattagactgtctgttgtcagccaggagtctctcccattagaatgcctggggtggcccaggtatctctatcattagaatgcctgtggtaggacgggaatctcttccattagaatgtcttgggacttccaggtgtcaataccattagactgcttgtggtcagctgggagtctcctccattggaacgcctgggattgcccaagtgtctttataattaaacagccagtgttcggctggcaatctctttcattagactgtctggcttagcccagctgtctttatgattagactgcctggggtcggtcagaagtctccccattaaaacacctggggtagaccgggagtctctgccattaaaatgactggagtcatccaggtgttttttatgattagactgttggggatcagccaggtgtctccccattagaaagcctggtttcagccttgttgtctcccattagaatgcttagggtcgctcaggtgtctctatcattaaaataactgggggctcccaaatgtctctatcattagaatgcctggggttggccgagagtctctcacattagaatgcttgccgtcaccaagaagcctctatcatcagactgcttagggtcagcctggggtttctcctattagaaagcctggagtcacccaggtgtctataattagactgcttgggtcagccaggaatctctcctattagaatgcctgtgtccactcacgtgtctctattattagactgcctggggtcggccgggagtctctttcattagaatgcctgggtttgctcaggtgtctctatccattggctgcctgggttcggccaggattctctcccattagaatgcctggggtcagccaggagtctcttccattagagtgcctgtggtggcccaggttatcactttaaatagactgtctggggtccgccaggagtctctttcattagaatgcctggagtaaccctggtatctctatcactagacagcctgtggtcagacagaagtctctttattagaatgcctggggttggccaggagtctctcacattagaattcctgggatcacccaggtgtctttaccattacaatgcttggggttgcccacttgtctttatcattagaatgccaaagttttgtcaggagtctctcccattagaatgcctggggtcgccaagatgtttctaccattagactacattgtgtcagccaggagtttctcccatcagaatgacaggggtcaaccaggggtctctatcatcagaattactggggtcagctggaggtctctcccgtaagaatgcctaaagtcgcccaggtgtttctatcattaggctggctggggttgcacaagtgtctctatcattaggatgtctgggtcatccggaagtgtcttccattagaatgtgtggtgtcattcaattgtctctataattagactgcctggggtccatgggtagtgtctcccattaaaatgctggggattgcccaggagtctgtataattgaactgcctattgtcggccaaaaatctcacccattagaatgtctggggtcaccctggtgtctctatcattagattccctgggttctgccaggagtctctcccattagaatgctgggatcacccaggagtctctatccttagactgcctcgagtaggacacaagtctcttctattagaatcactgtgtttaagcaagagtctctcttattagaatccctggggtcgccaatgtatctctatcattagactgcctggggtggcaaaggtgtctctatcattatattataatgcctggggtcgcccaagtgtctctaacattagaatgcctcggatcagccaggagtctgtctcattagaaagcctgcagtcacccaagtttctctatcactttgcctgggtttggctgggagtctttttcattagaatgcctggggtctcccaggactctgcataattagactgcctgggtttggccaggagtttcttctgttcattagactgcctggggtcagccaggagtctctttcattagaatgcttgtggtcgcctatatgtctctatcattagactgcctggggtgggccaggagcctatcccattagaatgcctggggtagccctgctgtctgtataattagactgactgtggtcaactaggaatctctcccattagaatgcctggggtctcccaggtgtgtctatcattacattgccttaggtcagcaagcagtcgctctcattacaatgcctggggtcgccctggtatctctatcattaaactgcctgaggttggcagggagtctcccccattagaatgtgtgggtttgactgcagtcactcccattagactgtctggagtcacagaggtgtctctatcattagaatgcctaaggttgtctgggagcctctcccattagaatgcctggagtagcccaattgtctctatcatcacactgcctggggttggccgggggtctttttcattacaatgtctggggtctcccagaagtgtgtaaaattaaactgcctggggcaggtcaggagtctctcctattaaaatgcctggggtcacccaagtgtctctatcattagactgcctggatttggctgggagtccctctcattagaatgcctggaggtaccaaggagcttttatccttagatagcctgaaggcggacaagagtcttttccattacaatcactgaggttggccaggagtctctcccattagaatgccttgggtcgcccaggtgcctctatcattagattgcctggggttggccaggagtctctttcattagaatgcccggggtctcccatgtgtctctataattagactgccagtggtcaactagaaatctttcccattagaatgcctggggtcacccaggtgtctctatccacagactgccttggtcagccaggagtctctcccattagaatgcctgtgttcactcagttgtcacttaaattagactgcaagatgtcggccaggagtctcttccattataatgtctggggtcactcaagtgtctctatcattagactgcctgtggtcagccaggagtctctccattagaatgcctggggttgccaggagtctctcacataaaaaaatgcctgttgtagcccaggtgtctctattactaaaatgctcacttgtctctatcattagaatgccagggtttggccaggagtttctttcagtagaatgcctggggtcgaccaggtgtttgtatcactagactgccttgggctggttggttgtctctctcattaaaatgtctagtgtcgcccagtgtctctatcattagaatacctggggttggccctgggcctctcccataagaatgcctcaggttccccagctgtctctatcattagacagcctggggtcgcacaggtgtctctatcattagaatggggtcatccaggagtctctcccattagaatgtctggggtcacctaagtgtctctataatcacactgcctgggttcagctgggagtctctttcattagaatgcctgcagtcacccaggagtctgtataattagactgtctggattcagccaggagtctctcccattaaaatgcctgatgttgctcagctgtgtatccttagactgtcttgcttgggctgggaatttgtcttattagaatgcctggagtcgcccaggaatctcacctgcctagggtcagacaagagtctcttccattagaatcactgagggtggctgggagtctctcccattagaatgactggggttgcccacgtgtctctattattagactgcctggggttagccaggagtctctctcattagaatgcctggtttcgcttacgtgtctttatcatttgaccacctggggtcagccaggaatctctcttattagaatgcctggtgttggctgggagtttctcccatttgtgtgcctggggtcacacaggtgtccctatcattacaatgcttgccatcttccagatgtctccatcattacaatgcctctggatgaccgggagtctctcccattaaaatgcctgcgattgcctaggtgtctctatcataagactgcctgggatcgcatgagagtctctcccattagaatgcctctggttgctcaggtgtctctatctttagacttccttatgtcagccgggagtctctcatattagaatgcctgggtgttgctcaggagtctctaaccttaaactgcctgggatcagacaagtctctcccattagaatcactggggtgggctgagcctctcccattagaatgactgaggtcgcccaggtgtctactgttagactgcctggggttagccaggagtctctccctttagaatgcctggttttgcccagatgtctttatcatttgactgcctgggttcagccaggaatctctctcattagactgcctggtgtctgctgggagtctctcccatttgagtgcctggggtcgcacaggtgtctctatcatgacaatacctgagatcgttcaggtgcctccatcattacaatgagtgtggacgatggggaacctctcccattacaatacctgtggtcgcccaggtgtctctatcattagaatgcctgccattctaatgtcagttgggaatctctcccatgaatacctgagctcgaggagctgtctctatcattagacagcctgcagtcggccagtagtttctccctttagaatgcctggggtcgtccagatgtctttatcattagactgcccagggtcagccaggtgtctgtcttattagaatgactggggtcagctggcagtatctcccattagaatgtctgtggttgcccaggtgtctctatctttagacagcctggggtctacctggagtctttcctgttagaatgcctgtggtcacccatgtgtctttatcattagactgcttgggttcggccaggagtctctcccattagaatggctgaagttggccgggagtctcccccattagaatgcctgtggttgcccaggtgtttctatcattagaatgcctgaggtcggttaggggtctctcccattagaattcctgtggttacccaggtgtccctattagactaacttggttgggccaggagtctctcccactggaatgcatggggttgcccaggtgtctttttcattagactaccttgtgttggccagtagtctctcccataaaaatccctggggttgaccgagagtctctcccattaaaatgcctggggtcaaacatgttgctctataattacaatgtctggggttggtcaggggtctctgccataagaatgcctagtgtggcccagctgtctctatcactagactgcctaagttcggcaaaaagtctctcccataataaggcctgtggtcacccaggtgtctctatcataagactgcctgctgttggtcaaggatctcttcccttagaatgcttcggttcacccaggtgtctctataattaggctgcctgaattcagtcaggagtctctcttaagacaatgcctgggttcacccaggaatctctcttattaaaatgatgagggtcaccaacgcgtctctattattagaatgcctgggctcacgcaggtgtctctatcatcagacagcctgtggtcgaccggtagtctctccctttagaatgcctgtggtcgcccaggtgtctttatcattaggtggcctgaggttggccagcaatttctcccattagaatgcctggggtcagccaggagtctctttcattagaatgcctgaggtctccaaggttcctctatcattagaatgttcagggacagctgggagtgtttcccattgaaatgcctagggttgtccaggggtctctattattgtactgcctggggtcagccagggttctctgccattagaatgcctagggtcacccaagtgtctgtatcattggactgcctggagtcgcctagtagtctctcccattagaatttctgcggtagcctagatgcctctatgatagggctgcctaatatcagccaggaatctgtttcattagaatgcctggggtaagcagggtgtcttttccattagaatgcctgaagtcgcccatgtgtctctatcattagaatgcctggggtcacccaggtgtttctataattagaccgtctggggtcgaccaggagtctctcccattagaatgacgggggtcgcccaggtgtttctatcattagactacctggagttggcagggggtccctttcattagaatgcctgaggtcacccagttgtctctatttttagactaccttgggctggcgcaatcctctctcattggaatgcctgtggatgcccaggtgtctctaagctcatactgcttaggtaggccagcagtttctcctattagatttcctggggtcggccaggaatctctcccattaaaatgtctggggttgcccaggggtctctatcagtagaaatcctggggtcggtggtgactcttttttattagaatgcatagggttgcacaggtgtctctatcattagactgcctgggctcaaccaggagtctcttccattaaaattctgggggtcactcgtgtttctgtcactaggccacctggtgttggctgaaagtatctttcgttagaatgccttgggtcgcccagtttttactttcattagattacctggggttgaccaggagtctctctcatttcaatgccttcagttgcccaggtgtccctattgttagattgcttgctgtctgcaaggaatctctcccattagaatgccttgtgttggccgagagtctctcccattagaatgtctggaattgcccaggtttttatatgatgagactgcctggggtcggccaggggtatctttctctcgaatgcctgggttcatgcagctgtctctataattagacagctttgagtcagccaggagtctttcacattagaatgcctgttgtcgcccaagtgtctctatcattagactgcctggtgtcagctgggagtctctcccgttagaatggctaggttcaccccagtgtctttatcattagtctgccagtggtcagctagaagtctctctcattagaacgcctggggtcggtcgggagtctctcccattagaacacctgggattgcccaggtgtctctatcattagactgccttggctcagtggggagtctctctcatttgaatgtgtggtgtcaccagatgtctctatcattagactgtctggggtcagccaggagtctctccctttgtaatgtctgggaccaaccaggtttctctattattagactgcctggtttgtatgaaagtctctcccattggaaagcctggggtcgaccaggtgtctctgtcattaaaatgcctgggttaggctggcagccttcccattagaatgtttggggtctcccaggtgtctctatcattagacacactgggtttagccaggagtgtcacccattagaaagcctgtggtcgctcaaatgtctccatcattagaatgccactggtcgctcaggtgtctctatcattagaatgcctggggtcagctggtacctcttccatttgaatgctttccaggtgtctctatcattagactccctgggtttggatgggagtctctcccattagaaagcctggggttgacaagatgttcctatcattagaatgcctggtgtcggccaagaacctatccccttacaatgcctgggttcacccagttgtctctaccattaaaatgcttgagtttggccaggattctctcccatcaaaatgcctggggtagacaatgtatctccataatttgacagcctggggtcagccaggagtgtttcctgttagaatgccgggggtcactcaggtgtctttttaattagactgactggggtcggaccggagtctttttcattaaaatgccaggggtctcccaggtgtttctatatttagactgcctggggttggccgtgagtctctcacgttagaatacctgggtttgtccaagtgtctttgttattagactgtctggataggccaggagtctctctaattagaattcctcgtgttgcccaggtgtctgtatcattagactgcctgggattaaccaggagtctctcccataagaatttctggagtcgcccaggcgtttctatccttagactgccttgggtcaaccaggagactctcattagaatgcctgggttcggccaagagtctttcccattagaatgcctgggcttacccaggtgtctctataattagaatgccttggtttggccaagattctctcccatgagaatgcccggagttgtccaggtgtctctatcattagactgcctgtggtcagcaagaagttcttctcgttagaatgtctggggacgttaaggtctctctatcattagactgtctgggttcggctggaagtctttattattagaatgcctggggttgcacagaggtctgtatcattagactgcctgagattggccgggagtctctttcagtagcattcctgggttcacccaggttctctattattagactgcctggggtcagccaggtgtttctctcattagaatgcctgggattggaccggagtctctcccattacaatgcctggggttgcccaggtgtctctatcattagactgcctggcatccgctgggagtttctttcattgtctggtgttggctgggagtctctgctataatatcgcctggagtcgcctaggtgtctctttagaatgcctggggtcgcccaggtgtcttattagactgtcttgggttggatgggattctcttccattagaaagactgggctcaacaaggtgtctctatcattagaatgcctggggttggccggtagtctttcccattagaatgcctgggttctctcaggtgtctctttagttagaccacctggggtcagccaggagtctctcccattaaaatgctggggtttggaccagagtttttcccattagaatgcattgggccgcccaggtttatcattagaccgcctggggtcggccaggagtctcttccattagaatgccagatgtggcccaggttcttctatcattagagtacctggggtcggccgggagtctctcacatttattaaactgcctgacgtcaactgggagtctctcacattagaatttttggggtcacccaagtatgtctattattagactgcctagggtcggccatgagtctctttcattagaatgcctgtgatcgccaaggtgtcttggcgaatgctaacgtgtttctatccttagactgcctgtggtcagcaaggagtctctcccattagaatgtctgtggtcacccaggtgtctctaatcttagactgcctgtgatcgcccaggagttcgatttattagaatgcctagggtctcccaactgtctctatcataagaatgcctgaggtcgttcaggagtctcttccattaaaatgcatctggtcgcccaggtgtctctatcattagaatgaatggggtcacctggaagtttctcccattggatttcctggggtccccgaggtgtctctatcattagactgcctggcggtccacacaagtctctcccattagaaagccaggggtcgaccaggtgtctctattattagaaaccctggaatcagccaaaggtctgtcccattagaatgcctggattgcccaggtgtctctatcattacaatgcctggcttcagccagcagtctctcccattataatacctggttttgcccaggtgtttccatcattagactgccccaggtcagccagaagtgtctcccattaaaatgcatgtgtctctatcatgatacagcctgtgatcaactggtagtttctcccattagaatgccgggaatcactcatgtgtttttatcattagactacttggtgtcggctgggagtctttcccattggaatgccttgggtcgtccaggtgaatttattattagactgtctggtgtctgcgggagtctcttccattacaatgctttgagttgcactggtgtctcaatcgttagactgttgggttctgccaggagtgtctcccattacaatgccttgggtcaccctggtgtttttataattagatttcctggtgtcatctaggactctttcctattagaatgcctggagtcgcccaggtgttactattctttgattgcctggggtcaaccaaggctctcttccattagaatgtctcaggtcggctgggagtctttcccattaaaatgcctggagtcgcttaggtgtctctatcattagaatgctttggattggccagtagtcttccccattaaaatgcctgggtttggccaggtgtgtttataactagactacctaaggtagtctagggtcagccaggagtctctcccattagaatacctgggttcagctgatagtctctgccattagaatgactggggtcacctaggtttttttttttttataattagaccacctggggtcggccaggagtctctcccatttgaatgcgtggggtcacccaggtgtctctataattagaccacctggtgttggccaggagtctctcccattggaatgcctgtggtcgcccaggtgtctctattattagaatgtctgtggttgatcgggagtttctccaaaatgcctgtagttgattagctgtctctattattagaatgcttgggttcgagaaggagtctcttccatttcaatgcctagggttgatcagttgtctctatcattagaatgcttggtgtcagccaggagtctcttccattagtatgcctggggccatccaggtgtctctatcattagactaccttgggtcagccgttagtctatcccattagaatgctttggtatgcccaggtgtctctatctttagactgcctggctcagccaggagtcattcccataagaatgcctggtgtcagccgggggtctctcccattagaatgcctggggttgcccaggtgtctttataattagactgcctgggattgcacaggattttctcccattagaatgtctggggttgcccaggtgtctctatcattagactgctggtgttcggacaggagccgctctcattaaaatgcctgcagtcgcccaggtttctctatcattagacagcctggaaacggcccagagtctctcccattagaatggtgtctctcctggggtcagccaggaacctcttccattagaattcttgtgatggcccacatgtctctatcattagactgcctggggttggtcgggagttgctcccattagaatgtctggggtagcccaggtgtctttaataattagactgcctggggttgaccaggagtctctcccattagaacacccgtggtcacccagctgtctctatcattagactgcctggggccagccaggagtacctctgttagaatacttgagtttacctgagagtttctcccatacctggggtggcccaggtgtctctatcattagaatgcctagggtcagcggggagtctctgccattagaatgcctggggttggctgggagccttcccatttgaatgcctggggtcgtcaaattgtctctatcattagacttcctgaatgtagcagggcatctctcacattagaatgcctggggtcacccaggtatctgtatcattagactgcctggggtcagccaggagtctttcctattagaatgcttagggtcacccaggtgtctctatcattagactgcctgctgtcacacgggagtctttctcattagaatgcctggggtcacccaggtgtctctatgattagactgcctggggttggccaggagtctctctggttagaatacctggggccacccaggtgcctctatcattagactgcctggggcctgccaggggtctcttccattagaattcctgtggtcgttcaggtgtttctatcattagactccctgcggttggccaggagttcctcccagaatgcctggggtctcccaggtgtctccataaatagactgcctggggtcagccagaagtctctcacaagagaatgcctggggtaggctgggagtctccaccattaggaggcctggagtcacgtaggtgtttctaacattagaatacctggggtcatccaggcttctctcccattaaaatgtccgggctcaccctttgtctctattattagacgtctgccatcggcccagagtgtcttctattagaatccctgtcgaccagatggctttcaccttgccatgtctaatgttgatcagatggctcttgccttaccatgtctaaggttgcccagacaacttgggccagaagcagtaccattcaaatccagcagaatgatgcgactgtgactcactgcagactcaatcttcccagtcttacccaagtgatcttcccatcttggcctctcatatatctgagattgctcggaccttctttttttttctctctctctctcactctaatttcagtttgtttccacaatactcagagtaacttgctgttctttttcttctttgttccatcctttattctcctatgctccttcctgcaaactgagtttgacctttggattttttttttttttttggttacacttcaccctgtgtgtgacaaatagagagagagacagagagagagaggagtttttttaaattgcgacattaattaccttttattattgtacactcctacttaattatttggtctttagggttgttcactattatttccttgttattgttatatatttactgttggttcatttattttgagatggatgtcgactgcatgcatcgcatttagctgccagcttgtcatgtctaagatgaacagacagctctcaccttgccatgtctaaggtcgaccagatggctctcgccttgccatatctaaggtggaccagatggcacttgcctagccatgtctaagattgaacagttggttctcacctcatcatatctaaggtcaagttggatctcaccttgccatgtttaagattgaccagatgattctcaccttgccatatctaaggtcgaccagatggctctcaccttgccatgtctaaggtcgatcagatggctctcaccttgccatgtctgaggttgaccagatgggtctcctcttcgagtgagttcaacaagatggctctcaccttgccatgtctaaggttgaccagatggatcttgccttgccatgtctaaggtcaaacagatggctcttctttttccatgtctaaggtcggccagatgactcttgccttgccatgtctaagctcaaccagatggctttcatttttccttgtcttcagtcgaccagatgtctctcaccttgccatgtctaggtcaatcagatggctctcaccttgccacatctacgattgaccagatggctcttgccattctatgtctaaagtctaccagatggctctcattttgtcatgtttaaggttgtccagatggctctctctttcccatttctgaggtcgactggatggctctagcctttccatgtctgaggccaaccagttggctctccttcccatgtctaaagttaaccagatggctctcaccttgccatgtctgaggcagactagatggctctcgccttgccatgtctgaggtggacttgatggctcccaccttgccctgtctatggtcaacgagatggctctcaccttcccatgactaaggtggaccacatggctcttgatttgccatgtctaagctagatgagatgcttcttgccttaccatgtctaagatggatctgaagcctcttgcattaccatctctaatgttgaccagatggctcttgccttgccatgtttgaggttgaccagatgcttgttgccttgccatgccttaagtagaccatgtggctctcaacttcctatgtctaaggttgaccaagatggctttcaccttgccatgtctgaagtggacttgatggttcccaccttgccatgtctatggtcgaccagatggctctcaccttcccatgactaaggtaaaccatatgtctcttgccttgccatgcctaaactagaccagatgcctcttgcctttccatgcttaaggtggacccaaacccttttcgcatttccatctctaaagtcgaccggatggctctttccttgccatgtctgaggtcaagatgcctcttgccttgccatgtctgaagtagatcagatggctctcactttcccatgtctgaggttgaccagatggttctcaccttgctatgtctgaggcagacttgatggctcccaccttaccatgtctatggtcaacaagatggctcttgccttcccatgactaaggtggaccatatggctcttgccttgccatgtctaagctggacaagatggctttagccttaccatgttgaaggtggacctgaagcctcttgcattcccatctctaaggtcgaccagatggctgtcatcctgccatgtcaaaggtcgaccaggtggctgtcccttgtcacttctaaggttgaccagatggctcttgccttgccatgtctaaggctgatcagatggctcgcaccttgccatgtcgaaggtcgcccagatggctctcatcagcagcagtactgttcaagtccagtagcaggatgtgatgattcactgcaacttcagtctctgtagtctcacctgggcagtcttcgtgtctcagcctcccgagtccttgggactactgggaccttctttcactgttctattcctaacctgacatttagtttatttccacagtacttagagtgacttgctattgtttttcttctttgttcttttgtctgttttcctatgctctttcctgtaaatgaagttgaccttttagattttcctttgtcacactccagcctgggtatcacaaatggagagaaaaagagaaagagaggagatcttaatggtgatattaattaccttttaccttggttcactcccacttatttatacattgttctttaatattgtttatttttttgtttttgtaaaacatttactgttggattgtttttgtttttttgagacgtatttcagcaactagagttggacttagccacaagagtgccatgtctaaggttgaccagatggttctcgccttgtcatgtctaaggtcgaccagatggctcttgcaggcggcagtaccgttcaggtccagcagagggatgtgatcgtgatttactgtggcttcgatctccctggtctcacccgagtggtcttcccttctcggtttcccaattacctgggactactcagaccttcttcctctgttgtttttttctaaacccactgtcagtttgtttccacagtacatagaatgacttgcgttgttttccttcttcattcctctatttttctacactccttccagcatgataaatatgaacccactccagtctgggtgttacaaacagagagagagagagagaggagaacatcttaattgtgttatcgattacttttcacctttgttcactcctatttattgacacaatgttatctttttttattgttaaatattcactggtggattttctgcttacttattttgagagagatgtcagccacgagcattggaccaaggtcaaccagaggacttttgccttgccatgtctaaggtcgaccagatggctcttgcctccggtaataccgttcaggtccagcagagggaggtaattgtgattcactgtaaccttgatctctccagtctcacccggctggtgttcccatctcagccacttgagtccctcagactactcggaccttcttttttttctctaaccccactttcagtttgtttccacatacatagagtgacttgctgttttttttttttttcctttgttcttttctctcgttatgtccctatgctccttcctgcaggaagcagttgacttttatatttcttttaatcacactctagcatgggtttgacaaacagagacagctagagagtaacagagaagtagagagatagaagatcttaattgtgatattaatcacctattacctttgttcactttcacttatttacttattggtctttaaagttgttattatttctttgttattgttgaatatttactgttgaaatttttgtttatttattttgagaaacgtgttggcagcgagcactggacttagctttcatcttgccatgtctaaggtcgaacagatggctcttgccttcccatgtctgaggaccagatggctctcaacagcatcagtaccattcaggtccagcagagggatgtgatccttattctctgcagcctcgatctccccggtgtcatctgggtggacttcccatcttggcctcccgagtccttcagactacttggaccttcttctttttttttttctaacccaactttcagtttgtttctacagtacttacagtgagttgctgttgtatttcttctctgttcttttctctctatatatattcttaccctccttcctgcatgatgaatttgaccttctagattttttttttttggaacaatccagcctggttgtgacaaatggagaaagagagagaagatcttaattgtgatataattgacctttcacctttgttcactcccacttatttatttgtctttaatattgttatggttagttctttgttactgttaaatattccctgttggatttttttcttttgagacagatcttcccacgagggttgtatttagccaccagcttggtaagtctagggtcgagaggatggctctcagcagcagcagtaccattcaggtccagcagagggatcggatcgtgattcactgtgccctgggcgtcttccaggtctctacagggtggccttctgatgatctcggcctcctgattccctcagactatttcgacatccttcctttgtttttcctaaccttactttcagtttgtttccacagtccttagagtgactttctatttttttcttgttttctctttatattttcctgtgctccttcctgcttgatgaagttgacagagagaaatcgagagtgagagatagaaagagattagaagaatttaattgtgatattaattacctgttacctttgttcactcccatttatttgtctttaatattgtttgtagttatatctttgttattgttaaatattcactgttggatttttttctgtttggagtgaacaaaggtgaaaagtaattaataacacaattaagattttctcctgtctcgctgtttgtgtctgtctgtctgtctctctctccaagatgtcagctgagaggattggacttagctgccagcttgccaagtctaaggtcaaccagatggctctcaccttatctaaggtcaaccagatggctctcgccttgccatgactaaggatgaccagatggctcctgcctttggaagtactattcaggtacagcagagggatgtgatcatgattcactgtggtctcgatcttcccagtgtcacccaggtggtcttcccacttggcttccctagtccctcaggctacctgaacttatcctcctccttcctttttttcctaaccccactttcaatttttttttctacagtgaaactaactgaagttttagagagacttgctgttgtttttcttctttgttcttttctccctttttctacactcattcctgcatgatgaaattgaccttttatatttttttgtcacattccagcctgggtgtgacaaatggaaaggggaagagagagagtgagagatagcagaatattttaattgtgatattagttaccttttacctttgttcactcccacttatttattggtctttaatattgtttggtattatatttttgttattgttaaatattcactgttggactttttgtttattttgagacagatgtcggcagtgagcactggacttagccaccagcttgccaagtctaaggtcgatcagatggctcctgccttgacatgtctaaggtcgaccagatggctctagctggcgccaggaccattcaggtccagcagaggtatgtgatagtgattccctgtggcttccatctcccctgtctcgcctgggtggctttcccatcttggcctctggagtccctgggactactcagaccttcttcctctgttttccttctaagcccacttttagtttgtttccacggtactcagaatggtttgctgttttcttcttttctctatttttctatgctccttcctgcacgatgaagttgatcttttagatttctgtcacactctagcctggcatgacaaattgagaaagagagagagaggagaaaatcttcattgtgataatcttcattgtgataattatcttttacctttgttcactcccacttatttatttattggtccttaatattgttattatttttcgttattgttcaatatttaccatcggattttttgtctatttattttgagaccaatttcggctgcaagtgttggacttagccatcagcttgccacgtctaaggttgaccagatgcctcttgctggtgacagtaccattcaggtccagcagagggatgcattcccgattcactgagaactcagactcccaggttttacccgggtggtcttcccatcttggggggccccccgtgtacctgagactactcagaccttcttcatctgttttttgctgttcttgttgttgttgatcttgatggagtctcactctgttgccaggctggagtgcagtggctgatattggctcactgcaacctccacctcctgggtttaaatgattctccttcctcagcctcctgagtagctaggactacaggcatacgccaccaagcccagctaatttttgtatttttagtagagacgggatttcaccatgttggccaggatggccttgatttcttgacctcgtgatctgcctgccttgacctcccaaagtgctgggattacaggcatgagccaccacgcccagcctctgtttttttttttttttaacccacttttagtttgtttccacagtaacagtacttagagtgatttgcttttgtttttcttctttgttcttttctctattttcctacattccttcctgcacaataaagttgatcttttagattttttattttgtcacacactccagcctgggtgtgacaaacagagagacaggggagaagatcttaattgtgatattaattactttttacttttgttaactgcaacctgtttatgtattgttctttaatttttttgtcattgttaaatatttactgttggatttgtttatttattttgagagagatgtcggctgtgagcgttggactaaggtcgacctgatggacctcacctctcgccttgccatgtctaaggtcgaccagatctctctcgccagcagcagtacaattcaggttgagcagagggatgggatcgtgattcactgtggccttgatcttcctggtctcgcccgggcggtcttcccaactggcctcccgtgtcccttggactactcagaccttcttcctctcttttttcctaattccactttctgtttgtttccatagtacttggagagacttgctattcttttttttctttgttcttttctctctctcttttcctatgcttcttcctgcacggtgaagtttaccttttaattttttttttttaatcacactcaagcctaggtgtgacaaatagagagaaagaaagagagagagagaaggtcttaattgtggtattaccttttaccttcattcccacttatttattgatctttcatattgttattatttctttgttattgttaagaattcactcttgtattttttgtttatttattttgagacgaatatcggccataagcactggacttagccagcagcttgccaagtctaaggacgaacagaaggctctcactttgccacatctaagagctacatggctcttgtccattacagtaccattaaggtccagcagagagatgcaatcgtgattcattgtgacctcaatctccctggtctcacctgggtggccttctcatctcagactcccaattccatcagactactcggacattctctgttttttttctagccctactttcagtttattttcacagtacttacagtgacttgctgttgttttcctcctttgttctttactctattttcctacgccccttcctgcgcgatgaagctaaccttttagagtttttttgacacattacatactgggtttgacaaatatatatagagagagagatcttaagtgtgatattaattacctttaactttgtttactcccacttatttggctgtttattgttctattattgtttattatatttttgttattgttatgttgtttgtttgtttggagaaagggtctcactctgtcacccagaatgactgcagcctcaaccctttggacttgagtaatcctcacgcctccaatgcctcccctttccccagtacctgagactacagacacaagccaccacaccagttgacttttgtattttttacttctactttttttattattattattttcatgtcttgagacagagtcttgctccatcggccaggctagagtgagcaatggtgtgatcttggctcaccacaacctctgcctaatgggttcaagtggttcttctgcctcagcctcctgagcagctaggactacaggcatgtcccactacaccaggctaatttttgtatttttaaatgtttgatggggaagtatgtgtaaagacagggttagaggttctgccatgttgcccaggctggtctcaacttcctctttttttttctcttctaatccaactttcagtttgtttccacagtacttagagtgacttgctattgttttaggttttacgttcttctctattttcctatgctcctttttgcatgctgaagtttacctttcagattttttctttttgtcacactccagccagagtgtgagagaaagagagaagattttaattgtgataattatcttttacctttgttcactcccacttatttattggtcttattattgtttgttattatttctttgttattgttaaatatttactgttgtgtttttttgtttatttattttgagacaggtgtcggctgtgggtactggacctagctgctagcttgctacatctaaggtcgaccagacggttctcaccaccggcagtactgctcaggtccaacagagacatgtgatcgtgattcactgtggcctcgatctccctggtcttgcctgggtggtcttcccatctcagccttccgagtagctgggactactcggacaattttcagtttgcttccacaatacttagagggggttgctgcttttttcctttgttctttgctctctctctctgttttaagttttttacactccttcctgcacactgaagttaatgttttagatttttttgttggggggtgagggctaggtcttctcactctgtcacaccctggttggagtgcagcttgtgcgatcagcagtgagccatgattgcacatctgcactacagcctgggtgtgacagtgtgacacacaaagatcgagagagagagagagagagaaagggacagagagagagagagagacaacaattatgatcttaattgcctatttaccttagttcattcccacttatttggttgtttattgttctattattgtttgttattgtttctttgttattgttatgtttattttatttttattttttatgtgtatgtatgtacagacagggttctgggttctgccatgttgcccagcctgatctcgaactcctgcactcaagcaatcctcctgcctcgactacccaaactgctgctattacaggcgtgagccactgtgcctggctcctatctatatacctatctatctacttatcttttgaggagagatgtttcttttttaactttaattataataataattattattagaggtgttgtctcacatctcctgggcagcaattctccagccttgtcctcccaaactgctgcgattacaggcatgacctgccatgcacggtctggttatatttttgatgtatttattctttccagtcctcgtttccactttgggtgcatatttgataatatggggattgaaaacaaatattttgagagagatcaatctcacaaacctgcctttcctttctagtggcacaagcctcatcaggggtagtgtgcctgatctctggtggttttaaatagtgtagaaagcattgctatatgtattttccctgccagggagtcccaaaaaacagctagagaagcaaattatagaagagaaagaggtttataattaaagtgagggtcagaaacttttgtagataaggctgattttagccaagatttgaaggagagattccttcattcaacagatgctgcagtctacctgatatgtttcaggtactcctatgaaataagagtacaacagtgaacaaacattaaacacaaagtttttaatctagtgaggcagagaaacttccctcaaattatcatacaaatatgaacttccatgaaagcaaactcagtgtccagtaggaaaattgtgaaattatgaaatgttattttgatttaatgtatagccattgaggttctttcaaataattataaaatgatcacaataacaacaggtattttaaaagtgtggtataaaagtacagagtataatctttgttttataaaaataaatgcatatttacctctgcacagaggtggttctatgccatgctaaactggttatccctggtgatgagattagcaatcacagactatgttctcataaaagaataatgttttagtcaggaggcaagcaaatttgtttttccactgtttgaatttacaattaaatactttgcatgctttaaatgtaacggaagttttgttatatactctgattctcatattaggctgtttcattttaattttgacattggcagggaataaggtgaaggtggactcttcttgttcagtggagcacatgtggtcctggagaaagctgtcacacagtggactcagagatgtggtccacgggcactaatttcctctcagtccctgcctaagcaagattcatcttcctctgcctgctgtttcatttttttcttctattgtctggtatatcttaagataaaaacttgtttccaaagggaaagtttcagaaatgtttctaagaataataattcaagttggatttccaagtagtattcctgggcaactgattaaattcttttgtcaataatcaaaatctggaatgtcctggattagttccaccatttcatcatgataactccctcttctataatccctaccagaaatgattgctttgcttaaaagcttttccctgagaagacactggtgtgttatttctttatcagcttatgaaaattaattctggttgggtacagtggctcatgcctgtaatcccagcactttgggaggctgaggtgggcggatcatgaggtcaaaattgagaccttcctagccaacatggtgaaaccctgtctctactaaaaatacaaaattagctgggtgtggtggcatgcgcctgtagtcccagctacttgggaggctgaggcaggagaatcacttgatcctgggaggcagagggtgcagtgagccgagagagcgccactgcattgcagcctggcgacagagcgagactccatctaaaaatatatgtatattaattctacatatctaggatttttactgtgcctttgtgtttttttaagctactggttttctcaagttaaacattaaaagtattatggaagtactgatgatgtactcagaggaaaacaatagagcatataatttatttgttataaaatgtaaaagttctgcaagattttcctctgatttgtaaaatgttctctctcaagaaagtttttctttacgtcttacatttttttttattttaaagacccacagggttgcttaaagtgtgatagtcctgttgttgtagcgaagataattacacatacaacctggcttttgtggcatcttgcttaccctattttgcagaacacagataccaaaggttggccttatgaagctggagctatttttgcactgttatttcagaaatgctgaaagaacatcctactgattttctaatactcaaaattatacaataatatacttggacgtttaggtcttaaagacttttcatcatgagtttctgttaaaatctaatatgaaatgcagctgccatccagaatcttaacagtgtttgctgccagccaactgaatgacttattggaggaacgattcatgacttctgggcctgagggactggctgtcagggggctggtttgagcaaagctcttccataggtgactccatatttgcactgacagaagctcctattgcacagaattgtacaattattcagaaagagtagaaatcatgaatctacattttacctgatttcaaactggttgacaatttacttctgcagattatttttctcttctccacttaatttataatttattccatctatttttttccttttctgccaactattgtatttttctagggatagttgcaggaacgaaactgatttctatcagagtgcttattataattctattctattactctgtgaacaaagatgcaaaaatcctcacccaaatattaagaaatcaaatccaaaaatgtataaaaagaattatacactacaacccagtgagatttattacaggcatgcaaatctggttcaacatttgaatataaattaggctgggtgtggtggctcataccggtaatcccagtgcagtaggaggccaaggaaagaggatcacttaaggccaggagttcaagataagcgcagacaacatagcaagactctgtcttttaaagaaattagttcatcatattaagagatataaaaagataatatgatcttatcaatataatcagaaaaattatttgacaaaattcaaaatctattcatgagaaaaccactctgcaaactaaaaatagggaaaaacttcctcaatttcaaaagaatgtttattaaaaaaaacctacatcttacctcatactaaatgtagaaacactagatgccttcctgctaagatcaggagcaaggcaaagatgtctcctctcaccattcctatacaacattatactgtaagccccaggtaatacaatgacaagaatagaaaaggtacatagattaggaaggaagaaataaaactgtctttttacacagatgatataattgcctatggagaaatctgaaaggatcacaaaacaaaatcttagaataaccaattataatgagcaattataccaactttgcaaattataagaaaatgtaaatgtcaattattgtcctacatattagcagtgtaattagaatctgaaatttaaaacaatgatatttatgctagtaccaataacaataaaatacttaagtgcaaatctaacaaaataaatataaatataggactttattcacttcaaaactgtgaataaaaacatcaaagaagatctaaataaatagagagaaaattcacattcaagaaacattcaactttgttaaaatgtcagtacctcccaactttacatgttcaatgcagtcccaatcaaaattccacaaagttagtttgtggatattgacaaactgaccctaaagtttatatgaaaaggcaaaagacccagaatagcccagaaaatattcaaaaagaacagttggaatgacactacccaactgtaagaactactataaagctacagtaatcaaaataacatggtactgttaaaaataatagagaaacagataaacgatacaaaagagaaaggtcggaaattgacccacacaaatatagtcagcttatttttgatgaaatggcaaaggcaattcaattgagagagaataatttttcaaaaaacagtactggaaaaactagacatccacatgcaagagaaaagaaaaaaaaaatcctaaacccagacctaacaactttcacagaaattactcaaaatggatcatagctcaatataaaaggaaaacccacaaaacttttagaaaataacaaagatcagaatctgaattacctcaggttttgctcctttctacaacacccaaaatattatccatgaaaggaaaatctgctaagttgaactattttaaaaataacatttctgcactgccaaagatgctgttaaaagaataaaaatgcaaaccacagaataaaagaaaatatttgcaaaacacataactgataaaagactggtatccagaatatgcgacaagaaataaagaactcttaaaacgcaagaataagaaatgaacaacccaattataaaattgcaaaagatccagataccttactaaagaacatataagcatggcaaataagcatatgaaaatatgctcaacatcatatgtcattaggaaattgaaaataacaatggcatactgccacacacatattagaatggctaaaatccaaaacaatgactacactaaatgctggtgaggatatagagtaacaagcactctcatttatcgcgggtgaatatgcaaagtgctatgaccagtttggaagacagtttgccggtttcttacagagctacacatacatttaagtgcaatccagcaatcacactctgtggcctttatccaaaagaggtggaaactttcatctacacaaaactcttcaccctactattaagaagagttttatacataattgccaaaacatgaaaccaaccaagatattcttcaataggtaaatgaataaactaactggggtgcaactatacaacgaacattattcactgataaaaagaaatgagctgtcaagccttgaaaagatatgaggaaccttaagtgcatatggttgggaaagaaggaaatctgaaaaggctacatgctatatgattccaagtatatgacattctgtaaaaggcaaaaccaaggagacagtaagaagatctgtggtatccccaagtttggggggaagaagggagagatgaataggtggggtacagcatatattttaagacagcaaaactattctgcataatgcagtaatggtggatacatgtcatgtcattatgcatttgtcaaaatccatagattttaaaataaaaaaaaccatgaatttgaatgcaaactttagatttcagctaataataacttttctatattagttcattaacagtaaaaatatgccacaccaaagtaaggtgttaataacagaggagaagctgggtgcagggagaggatacatggaaactctgtgctttccacttaatatttatgtaaacttgatacttaccaaaaaaataaagtataaaaaatatcccaatgattactatcaaaagtagactggatttaaaaattatactagttacaaatatgtgactgaatatagtcctatgcagcaattaaaataaataaactcaggtgttaaatgtcatccccatgatcgtaatcacaaaaaagccatagaatatacacaaaagaaaataaaaagtgtaaatgtttcaccagaaaaaatcaaccaaacaagaagaaataatgtagaaaatacaaaactagaagatgtaagatatacagaaaacaaatagcaaaaggacagaactctctacttttaagtaattattttaaatgtaaatgtattaaactatccaattaaaaggcagaaatcagcagaacagactataaaacatgatctaactatcttgtttttacaagattcacattagattcaaagatacaactaggctgaaagtaaaaggaagaaaacagatatttcgtgcaaacagtaagcaaaatagatttgggttggctatattaatatcagacaaaatagacttaaaatcaaaaatcttacataaaaatacaaagacactgtgtattcacaaaagtccctttagcaagaagatataaatattataagcatgcatgtacctaataataaaccactaaaatatatgaagcacaaatcgacagaattgaagagagaagtcgacagaattggagaagtcgacagttctaaaataatagagatgataatactccactctctgtaatgaacagaatcaccagatagaagataagttagaaataaatggcttatataatacaacaaaccaactaaatttaacagatacatatacaggatactccacccaacaacagaagaatacacactattctcaatgtccatggatcacacatggacattctccaggatggactgtatgttatgtcacaaatcaagtcaataacagaaggaaaactaaaacactcacaaagttgtaaaatttaacatactcttaaacaaccaataagtaaaagaaaaaaactcaagggaaattaaaaaatacagagaatggaaaatgaaaatacaacataccaaaagttatgagatgcacaaaagcagtgtgaagatcagaaatttatagctataaacacattaaagaagggccttggctgggcgtggtggctcatgcctgtaatcccagcactttgggaggccaggcaggtggatcacctgaggtcaggagtttgaaactagcctagccaaaatggtgaaaccttgtctctactaaaaatacaaaaattagccgggcatggtagcgggcatctgtaatccaagctactcaggaggctgaggcaggagaatcgcttgaactcagcgggtggaggttgcagtgagctgagattgcaccacttcactacagcctcggcaacagagtgagactctgtcaaaaaaacaaaacaaaaagaagaagaagaagaagaagaagacgaagggtctcaaatcaataacctaactttatgacctaacaaattagaaaaagaatgaactatgcacgaaataaacagaaagaagaaaataatgaagatcttagtagagataaagaaaatagagaccagaaaaacagaaaaccaacaaaaccaaaagttggttcttggttcttcaaaaatgttgacaaattcacaaacttctagctacactatgaaaaaaattacagaatactcaaaatagtagaatgagaaatgagatggggacattactactaattcttctttttttttttttttttttgacagagtctcgctctgtcaccaggccggagtgcagtggcccgatctcagctcactgcaacctccgcctcccaggttcaagcgattctcctgcctcagcctctcaagtagctgggattagaagcatgcaccaccatgcccagctgatttttgtatttttagtagagacagggtttcaccatattggccagaatggtctcaatttcctgatctcatgatctgcctgcctgattctaagaaataaaatgttttaaagagtgtactgtgaacaactgtgtgacaacaaaatgaacaatctagatgaaatggacaaatttctaggtataaaaaacctagcaagacttgattaccaagaatagaaaaattgaattgatccataacttataaggaaatcaaatcaaaaatcaaaaacctgctgacaaagaaaagcccttgacctgatggcttcagtagttaattctaccaaacattttgaaagactgaaaatctttttcaaactcttccaaaaaattgaaaaggagagatcagttccaaactcattccacaatctcagcattaccgtatatcaaagccagaaaaagacactacagaaaactacagattaattatcccttatgaacacagatgcaaaactcaacaaaattccagcaaataaaattcagcagcatattagaaagatgatctcaccatcttgaattaatttttgtataaggtgtaaggaagggatcgagtttcagctttctacgtatggctagccagttttcccagcaccatttattaaatagggaatcctttccccattgcttgtttttctcaggtttatcaaagatcagataattgtagatatgtggtgttatttctgagggctctgctagacctaaaactataaaaaccctagaagaaaacctaggcattaccattcaggacataggcatgggcaaggacttcatgtctaaaacaccaaaagcaatggcaacaaaagccaaaattgacaaataggatctaattaaactaaagcgcttctgcatagcaaaagaaactacatcagagtgaacaggcaacctacaaaataggagaaaatttttgcaacctactcatctgacagagggctaatatccagaatctacaatgaactcaaacaaatttacaagaaaaaaacaaacaaccccatcaaaaagtgggagaaggacatgaacagacacttctcaaaagaagacatttatgcagccaaaaaacacatgaaaaaatgctcaccatcactggccatcagagaaatgcaaatcaaaaccacaatgagataccatctcacaccagttagaatggcaatcattaaaaagtcaggaaacaacaggtgctggagaggatgtggagaaataggaacacttttacactgttggtgggactgtaaactagttcaaccattgtggaagtcagtgtggtgattcctccgggatctagaactagaaataccatttgacccagccatcccattactgggtgtataccctaaggactataaataatgctgctataaagacacatgcacacgtatgtttattgcggcactattcacaatagcaaagacttggaagcaacccaaatgtccaacgatagactggattaagaaaatgtggcacatatacaccatggaatactatgcagccataaaaaatgatgagttcatgtcctttgtagggacatggatgaaattggaaatcatcattctcagtaaactatcgcaagaacaaaaaaccaaacactgcatattctcactcataggtgggaattgaacaatgagaacacatggacacaggaaggggaacatcacactctggggactgttgtggggtggggggagcggggagggatagctttaggagatatacctaatgctaaatgacaatttaatgggtgcagcacaccagcatggcacatgtatacatatgtaactaacctgcacattgtgcacatgtaccctataacttaaagtataataataataaaatttaaaaaaaaagaaagatgatctcaccacgaccaagtgcaatttattcttagaatgcaaggatatcttaaaacatgaattttttaacatataaaaattgatcaatgtgtacacattaacaaaataaaagaaacattgatcacctcatggatgcagagaaaagtattttatgaaattcaaaatcttttcagggtgaaaacactcaaaaaagtaggaattttaaaactaaaatactaccattgtgaaatccacacattaaaaaaccacatcaaacaatgtactccagggtgaaagacaaaaagcttctgctctaagctcaggaacaaggcaaaggtgtctgcttttgctatttctattccacatagtgttggaagttctagtcaaattaagaattaaaaagaaacaaactatccaaattggaaatgtagaggtaaaattactctagcctacagataatataattttatgtggaaagctctagagatttcacagatccacacaaaaagtattacaactaataaattcagcatagtagcagcatacaaaattaacatgcaaatatcacttgtgtttctatacagtaatgatgaataattagaaaacaaaactaagcaaacaagcacatttacaatagcactgaaaagaataaaatacgtcgggagtaacaaaaaaagcaaaaaattctattttgcagaaatagaaaaatcctacctaaatttcatatggaatctcaagggaccccaatgagtcaaaattatcttgaaaaagaagtccagtgttacaaaatgtacacttattcattccaaagcttaatacaaagttccaaaatagtgtggtactggcaaagagacacacatatggacactggaacagtataaagcagcatatggtcaaataatttttgatggggatacaaagaccgttcaatgggcaaaggactgtctttataacaattggtgctgggaaaaaatggatatccacaagcaaaaggatgaagttgaacatttaccctacaccataaacaaataaaaatgcatcaaagacctaaaggtaagaacttaaagtataaaatttttgaataaaatataagtagaaaacatcatgacaatatcacaaatataatgacacatttaaaaaagtagatgtggccaggcatggtggctcacgcctgtaatcccagcactttgggaggaggaggcagccggataacgaggtcaagagattgagaccatcctggtcaacatggtgaaaccccgtctctactaaaaatacaaaaatcagctgggcgtggtggcgcatgcctgtagtcccagatacttgggaggctgaggcataagaatcgcttgaacccaggaggtggaggttgcagtgagccgagacaggccacggcactgtacagcctggtgacagagcgagactctgtctcaaataactaaaaaagaaaaaaagaaaaagtaggtgtaaaactatccatagtagatactctcatttacataaaatccagtaagaaaacaaaactgaagttctggcttccggtaatactggagtagcttgctaaactaacactctcacagataacaatgatacaatctggataaaatattatatatagttacatagaaacattcatctatatacaatacatacatacgtgtgtgtgactgaatgagaatttcaacctttcccaccgtagggaagataattattctgtttgaattcagccacatttaccccctcttcaaataataacaatgctcttccaaagaatacaacagaatttagtctctataactaatatttataatttctattacacaatattaaaattcataaaatgtgtgaagaaatgtaacatgcaaactatacacaagataaaaagcaggcagcagaagctatttctaagatgtccgagatgatgtaatcagcagacaagtatttcagggcagctattataagtacgttcatgggggtaaaggaaaatattctcataatgaattaactcatgtagagtctcagcagagacatggaaattataaaaagagtaaaatagaagacaataaaataataaaataaaaagaacttttagtttacagagtagaaacagaagacagcaatataaaccatccaatctgaagactgaaacaagtttaaagaaaatgaaaagaggcctaagagacctgtgaaatgattgagtctgagacagagagggagagacagaaaaattaaatataatacaaaaacaaataaacaatagctgaaaatttaaaaacttggtcaaaaccgcaaattcttatattcaaaaggtgaacacactccaaaacaaaaacaaaaacaaataaaaccatatcgaggccctactgtgatttagaaaactggcagagcaagattttccagggagttgctatgatttctcattttcactatttataataatggaaaatatgcactccttagttttcttcttggagaaagtctgacttgtcaaacacagatgacttttcagtttagttttcaaggtttaatttcttaccttggaaatcaattaaatttgtttctttaaaatgtcgcagtaaaattgctcctccagacagatgtccacggagattctgtcctgctgcgtccgcctttcacagaactgaggttgttcctacaccagtttcagaagcgtgtaggcacgctttattacagtggcagcagcgtccctgtgcgaggtctaacccaggtgtgggccctgcagccagcccgggggtccaatgggtcctcctatggagcacaggaagaatcgtggcaggccagagatagacaaaaggtggcttttaaaagggaagtgtcaggttaccagggactgggtacttttacacgcggaccttcggccctgcccatagaaaggggcagcactgcgcatctctgaaggagtgtggcaaagggtggggcaataagaagggtggggcagaaaggagtggcccctcaggaggaaggggcggggagatcccagctactagaggacgcccgttccaatggcaactctgccaaggcgcctatgagagcctcttggcttttacctggtctgcgagaaatcaaactttgggcacaagtcatgaagccgacaagcccgggagacacagtgtcagaattacaaggtgagatcagccgcccggccaagctatcttctcgctagcaggtgaggcccgtgaacagccaagctccccttggcacggcggaaccgcagtggacgcgtggaggggctccgtagaggagggacctttgcttgggatgcggggagctgtagtctcttatctgcacccagcttgttagttgtacgcctgcaggactacaatctcagcacaaagcaggattgtagggcggtgcggatccctggagggagacagcgcggtgcgctcctgccggccatgctggctggggtggtgtcttaggcggttccagccgttagtcacagggcggccggactacaatcccagcatacaacgggagtggaggtggtgaccttgagagagggcctgtgctgtgcgcgcctcgcggggcatgctgggagcagtagcatcttagctgcttccggccgctggtcgcagggctgcgggactacaatcttcgcatgaaatggaagagagggtggtgcggatagcttgaggaaggtacggataccttgagggaggtatggatacgttgagggaggtacggatacgttgagggaggttacggatacgttaagggaggtacagcagcggtgcgcgccttgcagggcatgctgagaggaacagttttttaactgcttctggctgttggtggcagagctgcgggactacaatcccagtatgctacgggagtggggatgatgctggtcccttgaggggggggggcagcgcggtgccctcctgccgggcatgctggtaatagtgtcttagctgcttccggccgttggtcgcagggctatgggactacagtctcagcatgcgcagggttcaagggtgttgcgcagccccgcagggaggggcagggcggtgttgacctctgtttccaaacccatgctggctactgaatctgtgccacccctggctaaggggagtgagtccatagagggacttgaagggcaggtctgggctgggcagtgaggagagtatgatactgcaaagtgcgcctcgcctttgccaaaatcggtcgggtctcaggctcaccccacctcccgctgctcagttccgtttccctccagagcatcaagcctcctcccgcccagggggcctcctgctttcctaagctgctgtggaatcggcctgaggtcccagacgctgtccattgtgctgctgctctctgctttctccagccagagtgccagttcatccgcttttgggagaactccgccgcctggcctgcccgcggaaaaggtcacagctttgcagggggtgacatgggctatggcttcctggaaatgtcaccctcactagcgccttttagatagatgtgaattttgagacatgagggagagtaattattggtttacccaggagatgctaagagcagaggagaaaaccctaatttccaggcatgtgtcctgagccagggacaggctggccagaccctaagcccccagtgccgccagagagcagcctactgccctgatttgtgtggaatccccttcgtgctgctgggccttagcgtcagggacagcccagtcaggtgaaggtggggatgacccatgggcttctggaagtgggttggtggtcctgggagggccagcccatccccccttggagagggtctttgtgctgaaggatgcccacagaggcctgggtaccaggaacactgctctaggcaaggtgcctttcttccagatttggctgaaaggaaggaagacttggtcagcttttccacccagccatctggcccttacagggctgctccccatggacctgggtttgtagagtcctccagggctttgtgtggcccactagttctgatactgaggacacccctgcaggctgttaatttcagaacaaggggtgtgtgcagactggggcatgggtgctgtcagggtaccccaggctgctccagggacggtaccccagtgttcaacttggcttggggccccctgcctcatgcccttactccagggctgcttggcctgggcttgagccatggtccagaactcaggtggccccattgccacctaatataagggcctgtctccacagtgggtgagacgcccctgggcactgggctcttcagtcatccagggctatccactccatggcatgagttcccacattcagctgaactctgtctggctctggactggggtccctcctgtgccctttccctgaatcctctctgggtccgagacactgatcctcttcactctctggcttaaggcttgttctcctgacctccttggaggggtgctcaggattgaggacccctgctgttctctggggctgttggtactcggaggtgtgggtgttggcttgcactgagaagtccaaccccttcagtgcccttcaggggtcctttaagagcaggagtgatagggtgtgggggagtgccttagaggggtcttgccctcatcccctgccctgtctctgagacgtgtccagtaaacctgaggtcagcacctcaggaatgaaataatgtcttttgcagcaacttgaatgaagctggaggccattattccaagtgaaataactcaggaattaaaaatcaaatgccatatgttctcacttataagttggagctaagccatgcgtatgcaaaggcatgcggggtgacataatggactttggagactcagacatgagggtggcaggtggatgaaggatgaaaaaactacctgttgagtacaatatatactactcaggtgacaagtgcactaaaatctcagaatccaacactatataattcattcatgtaaccaaaaaccacttgtacccaaatgatattgacattaaaaaaaatttaaaactaacaaaatttataataaaagctttttaaaaaataaaaaataaaaacagtgtcaaagtgttaatttattgtgcattgcatagcaagccccttttgctcagtaccacactcactactggagaaacaaaaccttgaaaattaaagaagaacctgcacataaatgataattctgataagttatttatacactgcctacatgaatattacagatatgtgttaaagacaaagatctatgttagattgggtcagctttatgcttggtcattatatttccaattcttctctctcaaaatacaacagtcatgggttgccatggtgattattccaaatgcattgtgatcatatggaactggtgacgtgttctcatttccctttcagttataaaataagcctgatgttcctagccatcaaaatctcactaacacctaactacttcagtttcaactgtggttcctatttcaagacaatcactcaaggttgcaaatcacagaaagacaagaatgttttcattaaccaaaacattaatcaaaaattataccccttgaggccatgtaatttggtttttatttagtttattgtctattcaggtccataaagcctacaactgcaacaatatatacagttcatgatgacttaatatttattgaatagtaaaattaatacatgttaagagtagatctggcttcaggtaatcagggctgaagtgatatgtgcagtggtcaaggacaaatgtcaatgtataatctgacctcctgcactcgaaacacacatcaatactttaaatgcctcagaagaaagtcacgtaggagaataaatgaaagaaaatagaaaagttgttaattagattaagaaggaattaaacctggttttaaaatagagagataaagacatacaatataaaaatactgaagaacaagtagcataggcagaggagcactaaaggtataacaggaaagaaatatatctaaaaatattagtttctgagttaagattgtagatgtagagacctgacaaaaagagttgttcctacacattaaccaaccaaacaaacaaaaaagctggagaaactacaaacgcatggtcgatttctcctgagccctttagagaactgaggtcatggggaagacaacaaactcaacatcagggcatgcaggagcctggccccaggctttcaagtgcaccctggtgaactggtataattaagccagaacatttgaactagttcctggtggctgtgtgtcagtgggtgaggagaatgagaaaccctggagtctacagacatagagtttacatttttctgtatattttttctaggaacactacaaggcctgttagagaagaaagggtagaatcccgagaatgttttccccacagtgctgataaggagagaccactatcccatctactgctacagctctggagacagagctctcccacctgtcatatagaacacaaggaccaatctgcagagaaagagcatccaaacctgatccagtggacactggggaaaaactcaccacagctgagtgtggaaaaacaaggccaacacacacatctctgcacagatacatctcccataaagaaactaaagtgttaatttacagggcactgttgcagacccacttcagctggaagctaggaacatggacaaggagcctctctaccaccaagggagagagaggaatgtgctcttgtcctggcattgcatccacaggaggggcaggaaattctttgaaggtcagtaaccccataccccaattaacagtgcttaagtgtgaggctccctcagaacatcagagatatcctcactccctcacccctgccaccaggctaagaagcatggagcaaaaaaaaaaaaaaaaaaaacagaacaaaacagcagaatatagctgggccaagtgcaagagaccaaagtataatgagagggatttgaattatttttttgacagagtcttgccctgttgctctggctggagtgtagtggcatgatgtcagctcactgcaaccgtcacctcccgggttcaagcaatttttccgcctcagtctcctgagcagctggtattacaggcgcccaccaccacgcccagctaatttttttgtatttttaggagagatggggtccctctctggtggtaaaattgatgagaatatgacactttttatcattaatctagtaaaaataaaacaaagtgttatttttctgatatagatttatacttcagtatatgtcaggcagactgtaaagaactctatcagaatattgataaaataatgcaacactaaatattaaatattatatacttatatataattattatattgcccaaaatagcatattctctaatgcgtattttgcagtaggtttgtaaatagcttctttctctcatgacaatctttcttctttttctaatgtctgatcaagcccatagactttataatcagtctttggttcctggtccatttaattaatggtggtgttttccctaacatccataattgtgcatatgctttgtggcttacagtattaagaataccccaatatataagtgaggataatgaagataaacttgatctgtattatctgccttctgagagtgctcaggggctttaccttcaaccgaagggcaagctggttgctacgtctcatagtgagtgctgagttttgcatttagattgataagtgtgtgctgtatccaatagaagcgaattcttctttacactcagatcgacctatgtgacttcatgggtttttgttctatttcactcgggtatgcccaggttttcagatctcatgactactttattttggagttgccagactcagcaaataaaaatacacgacacacagttaagtttaatattcagaaagaaaactgttgtggcaagtcagggaccccaaacggagggaccggctgaagccatggcagaagaacaaggattgtgaagatttcatggacatttattagttccccaaattaatacttttataatttcttatgtctgtctttactgcaatctctaaacataagttgtgaagatttcatggacacttatcacttccccagtcaatatccttgtgatttcctatgcctgtctttactttaatctcttaatcctgtcagctgagaaggatgtatattgcctcaggaccctgtaataattgcattaactgcacaaattatacagcgtgtgtgtttaaacaatatgaaatctgggcactttgaaaaaagaacaagataacagcagtgtttaggaaacaagatagatagccttaaactctgactgctggtgagccgggcagaacagagccatatttctcttctttcaaaagcaaatgggagaaatatcgctgaattctttctcatgatggaacatccctgagaaagagaatgtgtgcctgcgggtaggtctctgaactggcccccctgggcatagcctgtctcttatggtcgaggctgccgagatgaaatagactccagtctcccacagcgctcccaggcttattaggaagaggaaattcccgcctaataaattttggtcagaccagttgatctcaaaaccctgtctcctgataagatgttatcaatgacaatggtgcccaaaacttcattagcaattttaatttcgcatcggtcctgtggtcctgtgattgcgccctgcctccacttgccttgtgatattctattatcctgttaagtacttgatgtctgtcacccacacctagtcgcacactccctcctcttttgaaaatctctagtaaaaacttgctggtttttgtggtttgtgggccatcacagatcctaccaacgtgtgatgtctcccccggacgcccagctttaaaatttctcttttgtactctgtccctttatttctcaagctggccgacacttaggaaaaatagaaaaaaacctacgtgattatcggggcaggttccccaatagaaaacaaataactttttagtataactataaaataaacatttgcgtgtaatatttctattcccacctattatatattacatacatacacacacacacacacacacacacatccttttgcttacctgaatttcatatttaatgttcttggactttttttgttgacctcaatccataagaactgtagttctccccagtacagtttcagcaccaatgaccaagtctcatcagaggaggccacatgatgatctagcagatagactctttattcagtatgtgagagtcatttacagactggggacataaattagaaatgatgagctggatgtcttttagggtgaaaaattactaaatttctaatctatgttactttttctatttattctctctgttacataacctatgatacagacagaataataatataattctgatacatggttaatgaataattccacatatatatgtgatttatatccaaatattgctttacttgtagtggtttgttaaccttctaatgtggagatcattgagcctttccgtgagtattctcctggtgtttctcctgagtgccacatggcaacagattttaactgagctgagggcccaaatgtgcattgttgagaactatcaattgcttggttctggaagttgaaataaatatgtccctttattagattaagtgcttgaagaaaaagtaaataagatactgcaatttctccctataaactcatacatatcaggtatgcagtttcttctgtataaactcatacatatcagatatgcactttctcctttataaactcatacgtatcaggtgggtttagagcaatattctacctcagccattattctctgagtacaagccaagaatgcaaactgtcacatgatctgtattgccttgcatatttatgcttacgggccagagtagttttaactgacgttgaaaacagttgaacactcttacatctcacgggaggaatagagtgaatataaaagatttttctcagcattttacagctgaattgttctacatccagtattaaattgatttaataaaataatactgccagcatccaaagaagataccatgagaacaatttctgaattattcagtacaatttcataataatattttcatacggagatctctcaattaacatatgagagaaattgtctttattatttgagagcaaagtatttttgaagacatgagtgggtatctttatattaagtgaagtcttaagaaaaagatccccgtgtgagcattttaatgtaactttatgaatgccataaatttgaaaaatgtgttttttgttctctggaaaattgagagcaggactttttaacacttccattctgagacgttaaagagagttaatataaggggtctcatataaaaactaagctagaggagaaccaaagcgttttgaaaagatacagttagtacaactgtagggaccagccccacagggttggtgggtctctccccatgtgtggagacaagagagtgtgtagaaataaagacacaagacaaagataaaagaaaaggcagctgggcctgggggaccactaccaccaagtcgcggagactggtagtggccccaaatgccaggctgcactgatatttattggatataagacaaaggggcaggataaggagagttagccatctccaatcataggtaaggccacgtgggtcacatgtccactggacaggggccccttccctgcctggcagccaaggcagagagagagaggagacagagagaaacagcttacgccattatttctgcttattagagacttttagtactttcactaattttgctactgctatctagaaggcagagccaggtgtacaggatggaacatgaaggcggactaggagcgtgaccactgaagcacagcatcacagggagttggttaggcctccggataactgtgggcgagcctgactaatgttaggctccacaagaagtggaggagtagagtcttctctaaaccgcccccaccccgcggggaaagggagactcccattcccggtctgctaagtagccggtgtttttccttgacactgaggctaccgctagaccacggtccgcctggcaacgggcatcttcccagacgatggcgttaccgctagaccaaggagccctctggtggccctgtctgggcataacagaagcctcgcactcttgtcttctggtcacactcctcactatgtcccctcagctcctatctctgtatggccttttttttcctaggttatgattatagagtgaggattattataatactggaataaagagtaattgctacaaactaatgattaatgatattcatatataatcatatctaagatctatatttggtataactattcttgttttatgttttattatactggaacagcttgtgtccttggtctcttgcctcggcacctgggtggcttgctgcccacatacaacaatgttcatatcctaaactccagaatctgtgaatatcttaggtaatgtgacaaaggaaaattaagatatagatagtgtcaaggttaacaagcagctgacttcatgataaattatctttatcatgagcagaagcctcacgtaattagaagggcgcttaaatatgaaagagggagaaaaaaagaaactttatcacactgatgtgatattaggtcaactcaatgcaatatttttttcctaagaaaatttttggggattattttcccattagcataaagttcagttcagttgttcaaacacctgtgatttatttttacatgcatattactatggatggtgataattaaacaaaaaatgcagaaaataaagaaatgctttctgaagagtgagcccaggtactatattattatatgagtatagacaatgtggaccgtacatgtgattacatgtgattgtaaatgtgtggatgttttatatatgtataagtaatttgttgtataatatagtgctcaggctgcatttttaaaaatttgtatgaggtgggtttgatcaagataaatgggtgaaataaaaatgataaggttggtaatagttttgactatgcaataaataacattgatgatagaagtcttattgcgtttttcaaatatagaaaagatgattcctcttcatcattaagattaccatgttgcacttatagtaatataaaaaatgcccttttcttccaagctgtcatcagacttacagccaacaccttccttctcttccacatcttcacaacccttctggatcacaagcctaagtccactgaccacatcacctgtcacctggaccttgcacacttagtgatgctcctcattgcggtcttcttggcatctccagacctgtttaagtaactacatttgcagaataacttaaagtgcaaggcatttttctacatgtacagggtgatgaggagcctctccagctccatcacctttctcctgactgtgctccaggtcatcaccatcagccccagcacctcctggttggtgaagactaaacagaaattcacaggttacattttctactcctgtttcttcctatgggttctcagtttgtctctcagtagtaacctgctttcccccactgtggcttcttctaaagtgaccaagactgatgtgctaagtatcagtaaatactgctcactttcttacataagctacatcttctaatatgacaaagactgatgtgctaagttgtgctttatttcttgtcattctattattcctatacatataattacattcatattgctattattttctcttttttatatggttgtattcattctgctgaaaactccagttcactaatccagttcactaattctgtcgtcaactcagtctaattttatatttaactcacatattgtatattaaatttatttacttttaaattattccacttatatttgtctcttttccaaatttgcttgttcagtttatagttccctgctgtttcaaaattatttcgatatcctcttttccccacttgttttgacttaaagatttaaaatatatatccggccaagcacagtggctcatgcctgtaatcccaatactttgggaggccgaggcaggcagatcacttgatgtcaggagtttgagactagcctggccaacatggtgaaactttgtctgcagtaaaaatacaaaaatttagatgggcgtcgtggtgggcgcctgtagtcttagctactcgggaggctgaggcaggagaatcacttgaactcgggaggtggaggttgcagtgagctgagatcacgccaatgcactccagcctgggcaacagactgagactatctcaaaaaaataatataggtatttccaatatgccaagtttatgcagtgtctaatttcttcttaccccttttcctggtacctcattttcttctgtgcttcatacttttaatgaattaatttttgcaacaggatctggtttattctgccttggcagggtggtcctgagagtggcaggtgccaccctcttctgggcaaagggaggtccagaaggccagttagggccaatggtgggagaacctgggggtggagtggggttggggatttgggctacagcccctggaatgtggtgaaaccaggatgaggcccagaggcagctgtggtaggccagggcagggcggaaggcactggactggaaccaggcaaggtctacagggccaagatcccaggccacacgggcaccctgggaggcggagcacagtgtcccatgacacagagcatgaaacacaggcccagggctcacagtaagcacatgaacaagtggacacagattcacaggccagttgacatccagccatggtgggaccagaggtagacacggtgtcacatacagaccacagggaagacatggcacaatgggacagatggatgtgatggccacaatgcacagaccaggccacagagctcgagggatatgggaaggggccttttggcatttctgcactggaatcatgtgagacaagggtggccgggtgctctggaggtgctggggtggtcccctcacggcccctctgagcttactctgtcttccacactttgttgagcagcttcctcacctcatcatagatgataaacactatggccacatgcaggcagacccggcccaggcaggcaatagtgcccttgtagaaggtcttgtgcccttccctcaggatttgcagccacagtcccatgtgttctgcatttgtgcacctccaggtctcgcatctggggctcgatctcgtgcagaggagcatttccgaagacactggccgctcccacaatggctccgaagaacccagcgaccagcgggttcatgagtttgttggggctgtccactcggtaccagctgcgcagggatgtcaggacaaagaaacaagttgcctggttccagccctgcttcagcacggggcctgtggggccccggtaagtcccggtgttcccgcacaatctcctaaccctgtggaagaatcccctgtacttggatttggagaggtctggccatggattaacttcaccttgatggtctccatgggacataggaccaccacggcctcggccacgctagctcactggccgcaccgctgcccgccttgctgttcaccagtccctgggcatcccgcatctggttgctgaggaacgcctgacgccgccttgtggatgaagccgcagagcagggagctgaggctgcggcccaggcccaggctgccttggctgcgactgtgtgcctgcaggccccatgcccggtatccggtggatgcgagtgctagtccagctgcagctgcatcttcacgaactcggtggggaacgggatgcagattttttttttcttttccttccttccttccttccttccaacttccttccttccttcccctttctttctttcttttttttttttttttttttttgacagaattttgctcttgtcccccaggctggagtgcagtggcgcgatcttggctcactacaacctggattcaagcgattctcctgcctcagcctcccgagtagctgggattacaggcatgtgccaccattcccggctaatttttttgtctttttagtagagacggtgtttccccatgttggtcaggctggtctcaaacgcctgactcagatgatccgcccgcctcggccacccaaagtgctgagattacaggcttgaaccaccgcgcctggccctgtgatgtagattttgatgctgccagccaggctgcctgccgggatcgcctgccctggagcaggagcatcagccgtgcgttccaggacgcaggcatggcatgaccggcaggaggcggagtgcccggcgtctcttgggatcggagcctcctgaattccacgctgggaccttaatttggttttaacacaaataaagatctcacataaagataaaaggggatgtgttggcttgtaatttttgttaaaagcaatggtatatgttgtataggatagtgtattgggatcaacaggtttttggggttttttttcagcccactgacattgaaagggataaacagttttttggttattagtgagcagttttctctcaggccatagtgtaggggtttgtggtcatgtagatgagagataggctgggattaaaatttgttatggcagtaataagagcaacagagctagactctgtcaaaaaaaaaaaaaacatagttagtagaagaaaaaaatcataggattataggattagagcagaaaaaaataaaacaaaaactacaaaagattaatgaaaatatttggccttttagaaaagttaaaaattggcaaaccttcagcagactaaacattttttttttaattcaaataaaaaaacgagttaaaaaaggagatattacaacagataacacacaaattcaaagattggtttgtggctactataagcaactgtatgccaatacattggaaaatctaaaaaaaaaaaaaaaatagacaaactcctagagacatacaacctaccaagattaaacagtaaagaaatccaaaacctaaacagaccaataacaattaatgagattgaagctttaataaaaaaactcttccaggaaagaacagcccaggacctgatggcttcattactgaattttaccaaacatttcaagaagtaataccaattcctattcaaactattctgaaaaataaggaggagggaatactttcaaactcattctatgaggccagttttaccctgatatcaaaaccagacaaagatacatcaaaaaaaggaaactgcaggccaatatctctgataaatactgatgcaaaaatctcaacaaaatactagcaaacagaattcaacaatacattaaaaagattattcattatgaccaagtggggtgtatccctgggatgcaaacatagtttaatatacacaaatcaataaatgtgatatgtcatatcaccagaatgaggaaaacagcgtggtactagcataagaacaaacacatagaccagtgaaaaaggatagagaacccagcaacaaatccacacatttacagaaaactcatttttgacaaagatatcaagaacatacagtggggcaaagacagtctcttcaataaatggtgctggggaaactggatatccatatgcaaaagaataaaactggattcctatctcccaccatatccaaaaacaaatcaaaattaattaaacatgtgaatataagacctcaaattatataaaactactatatataaaaaagttgtgaaaaattttcaggacatcagtatgggcaaaaatttcttgagtaataccccacaaccataggcaacctaagcaaaaatagacaaatggaatcagatcaaggtgaaaagcttctgcacagctaaggaaacaatccacaaagagaagagacaacccacagaatgggagaaaatacttgcaaaccactcaactgacaagttaataatcagaatatagaaagagctcaaacaagtctatagaaaaacatctaataattcaattaaaatattggcaaaagatttgaagaggcatttctctaaagaaagcatacaaatgggaaacaggcatataaaagttgaacctcagagaaatgcaaatcagaactacagtgagatattatctcaccccagttgaaatgtcttatatccaaaagacagacattaacaaatgctgacgaggatgtggagaaaagggaacttttgtgcactgttggtggtaatgtaagttagtacaaccactataaaaaaaacattttgaaggtttcttaaaaaactaaaagtgagctaccatagctaccatgcaacccagcaatcccagtactgggtatatacccaaaagaaagaaaatcagcttgttgcttcactgtttacaatagctatgatttgaaagcaaactgtctaccaacagatgaatggattaaaaaaaatgtagcacatatatacaatggagtagtattcagccataaaaatgagattttgtcttttgcaacaatgtggataaaagtggagagtatgttaagtgaaataagtcagacacagaaagacaaacttggcatgttctcacttacctgtgggatctaaaaatcaaaacaattgaacccatggacgtggagagaagaggttagttttcttaacctctttgagaggttaagcaagatagtaggggctggcggaaaggtggggactgttaatgggtacaataaatagaataaatataacctactatttggtagcacaagatgactatagtcaataataatttaattgtacattttattttatattttatattttattttatatattttattttattgaggtagagtcttgctcttgtcacccaggctggagtgcaatggtgcagtcttgtctcactgcaacctttgcctcccaggtttaagcaattctcctgcctcagcctcctgagtggctgggattgcagccacctgccaccatgcccagctaattttttgtatttttagtagagatgggttttcaccacatgcccagccaattgcacattttaaactaagagagaataattagactgtaagacaaaaaataaatgcttaagtgggggagggtgtatcccattctctatgatgggagtattatgtatttcatgcctgtatcaaaacatctcatttatccccataaatatatacacctactgtgtacccacaaaagttaaataaattaaatttaaaaaattaaaaaataaaatagcatagaattaagtaggcccagaaatatgaggattttaatgaaatgataatacctaagtaataatcaatcaagaagtaaaaacaaagtcatacttcactcccatttttgtttctaatctatatgttttctactttaaagctgtagaattttctttttttcattgctaattatattttaatgtgactagtctgggtctattttttctaaaattttcagtttttctatataatttttctctaacttttagtttctttgtttatgccccttatatttttgagaagtgtctattcagatttttgcccattttaaaactggattatttaattattttctattgagttttttgtttcttttgtattctgcttatcaatcgcttgtcggatgtgtagcttgcacatattttctctcttatctcttttttctttttgagacagagtctctctcatcacccagcctagtgtgcagtggcacgatctcagctcactgcaacctctgcctcccagattcaagcgattctcctgcctcagcctcccaagtagctgggattacaggcgtgtgtcactgcgcccagctaatttttgtatttttagtagaaacagggtttctccatgctggccaggctggtcttaaactcctgacctcaggtgattcacctacctcggcctcgcatagtgctgggattacaggcataagccaccatgcccagccttattttctctcattttaggaattgtctcttcattttattgattgtttcctttgctgtgcagaagttttttgtatgatgtgatctcatttgtacattttactctcattccctgtgcttttgaaacattatttaaaaatctttgctcagatcaataacccgcagtgtttttctaaggtttttttgtggtagttttatagtttcacgtattcgatttaagtatttaatccatttctatttgatttttgtatggagtgagagataggggtctagtcttattcttctacctatggatattcagttttcccagcatcatttacagaaaagaccatcatttatccagtgtatgttattggtgtctttgtcaaaaatgagttcactacaaatgtatgaattttcttctggattcactattctgttctattggtctacatgtctgttttaatgtcagtaccatgctgttttggttagtatatctttacagactattttgaagccaagtagtgtggtggttccagttttgtttggttttgcttttgcttaagatgcctttgaatattcttttatgtggttttatataaatattagaattttgtttctacttctgtgaagaatgtcattggtattttgatgggattgcattaaatctgtaaattgatttggcagtatgaacattttaacaacattgattattttatttcatgcaatataaaataccttttcattttgtttcatcttctttaatttctttaatttatattttacagattcattatagaaatctttcccttatttagttgtttattcctacttatttgtaagtattgtaaagaaaattttttttcagaatgatttctattgggatatagaaatgctactaatttttgtatgttggttttctatcctgcattattacttaatttcaaatctctctttaaaatacattttataagaaagaaagaaataaaattcatagaaaaattttgtgactaacactgtcattattccaaaacttcaaaaccaagccaatataagatacatttggatgtaaaattacatataagtatatatatatgtatatacaatatgtacatatataataactgagaagattttatttcagaaatacagggcattccaagaagacaatcagcttatataatttaataaaataaaataaaacaacagcatttattgagtaaattattgtatacctttgtaacatttataaataacttaaagctgggcacagtggctcatgactataatcccagcactttgggaggccaaggcaggtggatcacctgaggtcaggagttaaaggccagcctggccaacatggtgaaatcccatctctactacaaatacaaaattagccgggcatggtggtgcacacctctaacccaagctacttgagaggctgaggcagtagaaatgcttgatcctgggaggcagaggttgcagtgagccgaaattgcttcattgcacttgagcctgggcaacaacagtgaaactccattgagtataaatggataataataataattaatgataatcacattattattataacttagaaaaatactctactagtgaacatttcaattattaatgataacaatgcatcagtatataagaataaaatataaatgaccaatgagcacatagatgcttagcatctcttttcattagaaaaatgcaaatcaaaaccacaattaaatgtcagtttacacgcactaggataggtatattcaagaaaagaaataaatgtggatgagaatgtggagaaattagaaccctcataccgtgctgatggcatggtaaaataatacagccattttggaaaatattttggcaggtcctccacaggttaagatagagttaccatatagctcagcaattctactcctgagtatataccaaacagaaataaaagcatatgcctacacaaaaactttgtattatgtttataggagcattgttataaatagccataaagtaggtatgacccaaatatctatgggtgaataaccaaataaagaaaatatggtattatctatacaatggaatattagccataaaaataaatacagtcctatgatatgtgttacaacatggataaataataaaaacatatgctaaatgagaaaaaaaacaaagaaaaaagttcacatatttctataaaatgactagaatagacaactaaagatagaaagtggattagtcgttaccagggaaattgggtgggagaataagaaatgactgcttgatggatatggagttcttttgtgaaagggtgatgaaactattttggaatttgatagtggtgacagttgtgtagcattgtaaatagactgaaaaacactgaattttacactttaaatcggttaatacattgaactctatgttatgtaaattttagctgactgaaacaatttaacaaacaaagaaaaatagactatgaaacaagagaacaactgagggagccctacaggctccaggacaatgtggggggcctcagaagccttctgtgcttcctgtttgcctccactattctgaggtatccagttaactccccaggcctcctcatcccagcctggaaaatgactttagctccactcaaaaaaacaaacaaacaaaccaaagctctgacagggatggtcttgtccttgggcctcggagcagtggtctgatgctctgccacattctacagtagcctgtgtgctcagtcccacaaacccccaggccactttctgctctgaaagaccttcagaggatacagagcaatttccaaggtcagctcacttctttaagcctttgaaatttaggggccacccaggtcaattatgtcagtttatagagaaaaaaaaataaggttttcactactgtattcctctccatactgggtatagggggattcttcctaattttaattatgcacagcaatgaatgcagaaaacaagtttttgtcctctgaaggctatcctggggatggccacagcccaggcaaatccatgggaaccttgaggttcccaagccattggcctgttatcttttcccacccccgtgttatgggtcttgggcatgttaccaggagatggggtgcccctaccttatggcaaagctgccccgatcctctctttcctttcttcttgtcactccatcagtattaactcatcttctgatctttaacctgagaagtctgtgtgtgtttttttgtgtgtgtgcgcacatgtgtgtttatgcccaaacctgtacgcgtctaatggtgcagacgtgagattgcatcatatgatgagaaaattggcaggaatccccaggatttcagggattcattcccaaagcaaaccccgtgagagagttgagccctggcctaggatgtcagaatgctcttttattctctggactctgcccactttatgttctctccatatcccagtttcttctctccatatcctggagagaagtctcggcttctctccagatcccagttttccaattatccagtgaggtgttagatgtcaaagcgcttaagccacaactcagcatgcacatggtccaagctgcctgccaactaggatggatgtagcagggctgtgatcagggtgtgcccagatcttccttactcgagcagaagtagatgggttctgcagtgggcagctggaccttctgtccaagaagggtcgtgcacacaggatctttaaaggcccacagacaatgggtgcatgtgagccccacctccatcccccaacagcttcccatggagcataccaatttttcccctgtcctctgcatctggaaggtggtgacatcctcactgaacacatagactgatggacccttcatggtggagtagtcccacgaagagaatctgggatgctattaactgtacaagggactatggatgtgggccatgtgaaaacactagaacttcagaattaaatcttcctcactgcagcctgtggggaaaagaaagagagatcagactgttactgtgtctatgtagaaagaagtagacataagagactccattttgttctgtactaagagaaattcttctgccttgagatgctgttaatctgtaaccctagccccaaccctgtgcttgcagagacatgtgctgtgttgactcaaggtttaatggatttagggctatgcaggatgtgctttgttaaaaaagtgcttgatgagttcatgtcctttgtatggacatgggtgaaactggaaaccatcattctcagcaaactatcacaaggacgaaaaaccaaacaccgcatgttctcattcataggtgggaattgaacaatgagaacacatggacacaggaaggggaacatcactcaccggggactgttgtggggtggggggagaggtgagggatagcattaggagatacacctaatgctaaatgatgagttaatgggcgcagcacaccaacatggcacatgtatacatatgtaacaaacctgcaccttgtgcacatgtaccctaaaacttaaagtatagtaataaaaaaaaagtgcttgaagccagtatgcttgttaaaagtcatcaccattctctaatcttaagtacccagggacacaatacactgcggaaggccacagggacctctgcctaggaaagccaggtattgtccaagttttctccccatgtgatagcatgagatatggcctcatgggaagggaaagacctgaccatcccccagcctgacacccgtaaagtgtctgtgctgaggaggattagtaaaagaggaagacctctttgcagttgagataagaggaaggcatctgtctcctgcttgtccctgggcaatggaatgtctcggtgtaaaacctgattgtatgttctatttcctgagataggagaaaaccagccttagggctggaggtgagacatgctagcggcagtactgctctttaatgcatcaagatgtttgtgtacgtgcacatcaaagcacagcacctttccttaaacacagagatctttgttcacatgttttcctgctgaccctctcctcactattaccctattgtcctgccacatgcccctctctgagatggtagagataatgaacaataaatactgtgggagctcagagaccagtgctggtgcaggtcctccttatgttgagcaccggtcccctgggcccacttttctttctctatactttgtctctgtctcttatttcttttctcagtctctcattccacctgacaagaaacacctacaggtgcggaagggcaggccaccccttcacagccttccaccactatacagataggagaatgtcttaggaaggagacatgtattatccaagattatacaaggattccatggcaaagctagcactttggttaggattacatttgcccacatatagaagaaaacccaatataatagtagtgcagaccagagagaaaatgctttctttctcataaataagaatcctagagctgggcagtgcatgttgactctgatctgtgcatcaaggcagtcaaaaataatctatctttttgctaatttttttctttttttaacttttattttaagtttaggggtacatgtgcaggatgtgcaagtttgttacatatgtaaatatgtgtcatgaaggttgattgtacagattattttatcacccagtcattaagcctactctccactagttattttttctgcttctctccctcctctcaccctccaactcctgataggccccagtgtgtgttgttcccttctctgtgtctgggtgttctcatcatctagctcccacttataagtgagaacatgtggtatctggctttctgttcctgtgttagtttactaaggaaaatggtctccagctccatccatccatgtccctacaaaggacatgatcctgttcctttttgtggctgcatagtactccatggtgtatgtgtaatacattttcttcatccagtctattattgacgaacatgtgggttgattcaatgtctttgctattgtgaatagggcagcaataaatgtgtgcatgcatatgtcttcataacagaatgacatattcctttgggtatatactcagtactaaggttgctgagtcaaagggtatttttttctttaggtctttgaagaatcaccacacagtcttccacaatggttgaactcatttacactccaatgaacagggtaaaaatgttccttttctccacaactttgccagcatctgctattttttgacagtttaataatagccattttattgatataaaatggtatctcattgttttttggatttgcatttctctaatgatcagtgatgttgaactttttttcatatgcttgttggctgcatgtatgtcttcttttaagaagtgtctcttcatgtcctttgcccacgtttcaataaggttgtttgatttttcttgtaaatttgagttccatatagatgctagaaattggatctttgtcagatgcatggtttgcaaaatttttctcccattctatacgttgtctgtttacactgttgatagtttattttgctgtgcagaacatcagtttattttgctgtgcagaacatctttagtttaattagatcccatttgtcaatgtttcctttgctccaattgctttcggcatcttcatcataaaatatttgcccgtgcctatgtcctgaatggtatttcctaggttgtcttccaaagtttttataattttgggttttacatttaacttgttaaactatcttgagttaatttctgtatacggtgttaggaaggagttcagtttatttctttctttcttttttaattttagtttaagttccgggatacaagtgcagaacatataggtttgttacataggtatacatgtgccatggtggtttgctgcacctatcagctcgtcatccaggcttcaagccccacatgcattagctatttgccctaatgctctccctcccctcaccccctactgtctgattagccccagtgtgtgttgtttccctcccagtgtccatgtgttcttattgttcaactcacacttatgagtgagaacatgccatgtttggttttctgttcttgtgttagtttgctgacaatgatggaggaaggggttcagtttcaattttctgcatatggctatccagttaacccagcatcatttactgaatagggagccctttttccattggttgtttttgtcaggtttgtcaaagatcagatagttgtaggtgcgcagtcttatttctgggttctctattctgtttcattggtctacatgtctgttcttgtaccagcaccatactgttttggttactgtagccccgtagcatagtttgaagttgggtagcatgatgtctccagctttgttcttttttgcttaggattgtcttgactattaaggctcttttttggtttcatataaattttaaaataaatttttctagctttgtgaaaaatgtcagtggtagtttaatgggaatagtattaaatctgtaagtttctttggggagcatggccattttaacaatattaatttttcctatccataagcatgaaatgtttttctatttgtttatgtcatccctgatttctttgagcagtagttcatagttctccttgtacagacttttcacttcccttgttagatgcattcctaggtgttttgttctttttgtggcaatagtgaatgggcgttcattcatgattttcctcttggattgaccattgttggtgtataagaattctagtgacttttctttggaaggccgaggcgtgcggatcatgaagtcaggagattgagaccatcctggctaacacggtgaaaccctgtctctactaaaattacaaaaaattagctgggcgtggtggtgggcacctgtagtcccagctagttgggaggctgaggcaggagaatggcgtggacctgggaggtggagcttgcagtgagccgagatcatgccactgcactccagcctgggcaacagagcgagactccttttcaaaaaaaaagaatgctagtgatttttgcatattgattttgtatcttgagactatgctaaagatgtttatcagcttaagaagctttgggggtgagacaatggagttttctggatataagatcatgtcatctgccatcaagtgtagtttaacttcctctgttttgatttgaatgccttttatttgtttctcttgccagtaaattccaatactatcttaaataggagtggtgagagagggcatccttgacttgtgctggttttaaagggaaatgctttcagcctttgctctttcagtatgatgttggttgtgggtttggcatatatggcttttactattttgaggtatgttttctcaatatctcatttattgggagttttaaacatgaatggatgttgaattttattgaaagctttttctgcatctattgagataatcatgtcgtttttgtctttagttctgtttatgtgatgaatcacatattgatttgtgtaggttgaaacaacattgcatcccacgaatacagcctacttgattgtggtggataagatttttgatgtgctgctggatttggattaccagtattttgttgagaatgtttgcatcagtgttcatcaagaatattggcctgaagtttcttcttttgtctgccatgttttggtaccagtatgatctggtctcatagaaagagttagggagaataccttctgtttcaattttttgaaatagttttagtagaaattgtaccagttcttctttgtatatcggggagcattcagctgttaatttttctggtcctgtgcttttaatggttggtatgctatttattgctgcctcaatttcagagcagttatttctcttttgagggattgaatttctttctggtttgtcttgggaggatgtatgtgttcagaaatttatccatttctactaagatttttagcttatgtgcatagagttgtttacaatattctttaatggttatttttatttctgtggagtcagtggtaatttattatttctgactgtgtttatttgaatttttgatctttttgaatttggctacagtaaccaaaacagcatagtactggtaccaaaacagagatatagaccaatggaacagaacagagccctcagaaataatgccacatatctacaactatctgatctttcacaaacctgacaaaaataagaaatggggaaaggattccctatttaataaatggtgcttggaaaactggctagccatatgtagaaagctgaaactggatcccttccttacaccttatacaaaaattaattcaagatggattaaagacttaaatgttagacctaaaatcataaaaaccctagaagaaaacccaggcaataccattcaggacataggcatgggcaaggacttcatgtctaaaacaccaaaagcaatggcaacaaaagccaaaattgacaaatatgatctaattaaactaaagagcttctgcacagcaaaagaaactaccatcagagtgaacaggcaacctacagaatgggaaaaaaattttgcaacctcctcatctgacaaagggctaatatccagaatctacaatgagctcaaacaaatttacaagaaaaaaaaaaaaaaaaccccatcaaaaagtggacgaaggatatgaacagacacttctcaaaagaagacatttatgcagccaaaacacacatgaaaaaatgctcatcatccctggccatcagacaaatgcaaatcaaaaccacaatgagataccatctcacaccagttagaatggcaatcattaaaaagtcaggaaacaacaggtgctggagaggatgtggagaaataggaacacttttacactgttggtgggactgtaaactagttcaaccattgtggaagtcagtgtggcgattcctcagggatctagaactagaaatatcatttgacccagccatcccattactgggtatatacccaaaggattataaatcatgctgctatgaagacacatgcacacatatgtttatagcggcactattcacaatagcaaagacttggaaccaacctaaatgtccaacaatagactggattaagaaaatgtggcacatacacacatggaatactatgcagccataaaaaatgatgagttcatgtcctttgtagggacatggatgaaactggaaaccatcattctcagcaaactatcgcaaggacaaaaaaccaaacaccgcatgttctcactcataggtgggaattgaacaatgagaacacatggacataggaaggggaacatcacacaccggggcctgttatgggatgggtgggtggggggagggatagcattaggagatatacctaacgctaaatgacgagttaatgggtgcagcacaccaacatggcacatgtatacatatgtaacaaacctgcatgttgtgcacgtgtaccctaaaacttaaagtataataataataatttttttttaaaaaaaaaagaatgttaaatattggccctcaatcttttttagcttgtagagttttcagtgagaggtctgctcttagtctgatgggcttcactttgtaggtgacctggcctttctctcttgctgcccttaatatttttttcattttaactttggagaatctgataattatatgttttgagcatgatcttttcatggagtatcctactggagttctctgcattttctgaattttaatgttgacctgtatagcaaggctggggatattctcatggacgatatcctgaaatattttttaaaaattggctccattctccccagctctcttaggtataccaatcagttataaatttggtctctttagataatcccatattgctcacaggttttgttcattccttttgattctcttttttctattcttgtctgcctgtcttatttcagaaagacagtcttcaagagctgagattctcccatgttcttggtctattctgatattaatatttgtgattgcattatgaaattactgtattgtgtttttcagctctatcaggttgcttagattcttctctatccaggctaatttgtttgtcagcttttgcaatgttatattgtaattttgagttttcttgcattgagttagaacatgctcctttagctcagtgaagttcatttttatccacattctggggtctacttctgttatttcagccatctcagcctcagccctattctgaacccttgttggagaagtaatgttgtcatttggaggagtgaaggcactctagctttttgagtttttagtattcttgtgctgatcctttctcacttttgtgtgcttatctacctttaatctttgaggttgctgacctttgaatgggatttttgtttgttttcctttcaactgtttggccatgttgtgtagggctgttgcagttctttgggcatctgccccagtctgtagtcatctaggatttttcagtatctggaggtatcattagtgaaggctgtgaaacaacaaatcagcccacccctttctctgggaggtccatctcaggggaggtgcagacctgttgctggcttgaacacacctgtaggaggtgactggagaccccttttgggaggtctcacctatccagggggaacaggattggggacccacttaaagaagcagtctagccccactttcatagagcagccatgctatgctggggtaccacttctgcccctcatcaggttgtgctctctaaagcctggaggctgaaaaagctaagttgctgaaacagcaaagttgatggcccacccctatctctaggaactctgtcccagaaagttttcaaacttctgttggccagagaacatcagtggaagtggctggaggccctggttgggaagtcccactcagagataaggggcatatcaggatcctacctaaagaagcagtctgatcacatcatggtagagccactgtgctgtgctgggggattgcttctgccccctgtatggtttggggtctcctaagcccacaggctggaatggctgagttgtccaaacagcaaatgtggtggcccacttctcccactggacactgcatccagggagaaagcaaaattctgtctgctggagaatatggaaggggctggctggaggcccgagtaggaggccccaccctgagatgagaaatgtgtcagggtcccacttaaacaagcagtctggccacattttggtagagccactgtgctgtgccagggcttcccttcatctgccatcagttttgcttggactctcctaaacccacaggctggaaaggctgagtcatccaaacagcaagtatggcagtctgcctctgtctccagaactttgtctcatcccaggtaggtaaaacactgttactgggggctggctggaattccaagccagtgggtcttatcgggtgaggcatcatggatgtggggcccacagactgatgttgttcatccctgtggtttaggcttcctttctgggatttttatggtggtcccacctcctgttttgtccgagttgcagtcacctttgctggagatcctggagccggagtgtgtaaagcttctgagattctatttgtctgagcagtttctctggcaagaccatgcagctctgtgtgtcagaccaaaggccctggtgaaatgggttcatgagaaaatctcctgacctgagggataaaaagatccatgggagaagtgtggtttcacagggtcacacattcactcaccacttccctggacagggtagattcccttcgctctgtgtcacttctaggtgggcagttgccatgccctgctcttctccattctgcatgggttgagttgtttccttcattattcccagtgcaaatacctgggtgtttcagctgaaggtgttgtatttactctcctcctttgttcctttccatgagagccacacaccatattacttctagtcagccatcctggcacccttttctgctacaatatttcagtagatggtttttatcctgtaggctgtctcatgggccaagatggctgtaggaccgtcagcctacaccagcaaccatgtgcatttcaaagatcaagaaggaggaaagatgcaaggtcaaagtggctcacacagctgtgtcagcctcatctgaacagtctccccaaagtcccgtcaatacttctggttacacccaattgtcttgaatgttttctagtcattattagcttcaataggggtcaggaactataaccattgtgtatggtaagttgctgtttgaataaaactgaatctctgtctttaagaatgaaagaaaaataaaaactatggcaataaccagtgctctttttctgcactaaattcaaagataacaaggagaaaatggagtttgtctcaggtgaagtggcacttattttccaagcaaagcctcttttggtgtttatttattttcagatcagatgggaaaaagtcttggttctgacaagcactctttttatgaccaaaggttagttaagcttaacttaactctcttcttgacttagtcaaccttggcttgttgccctgctcctggtctgagaagcttattttcagaaatgctgctaagattgcttagtaaaaatccacatattttttacatctactaaaatcctcattccccttccctgatatttaagtccttagcctgcctgtaaacagaattctgttacaaaaaaaaattcctcctcctttggtattttatcaaatttatttcagtaattttttatccactgatttatttgcttattgattataaatcctgagttgtctgtgttcagagttatgatcgatttctgaaccgtattacaatggccataacatctactgcaatagtgttaaagtctttcttccgaatttttaacaaatgtcataatttttttaatttgacagtttcccaacaggatgtttgagtataaaaccagttttcagttccttcccaaaaatgatgtcaaccactgtgtagttgtatctgcctgacccttgcgtgtctaaaaaagtatgttcttatttaaaggggtgagggtggaagattatagagctaacatttttctaaaatgctgagtcataattgaaaccatacaaataaaagaggtagaatgcttggattccaacatttttaaccctgaggatacttcaatgtccatgatccatattactgtgaagataatgcacaaaaaagaaaactgatgattaaaattgaacatgatacaacgtatcattgactaaaaactaacataagagaaaaatattctcaaaaacatttgggtatccacagtttgacccaggaaagttgactgggtagatataatggtccatatagaaaatttatagaagcagaatctgtaaattatgatgtgaaaaagtcagataatttttatttaaatatagtgatcatgataacaataattcagttgaattaaaaattagaacagattaacttgaatttgttatgttctataaaatataaataatggagttaaaatgtcatatatgagtttgctctggaaaacacattctcaaataaataaaatctgattttatttgattatttgactgattttatctgtttattaaacccataataaaattattttgtgtggttcaaattctctaacataacatagtatggtcaaaatgaaagggtaaaaattgcaagaccgacttaacatttgtcatcttaaatgtactataaggatgccttttaaattaattcagtgattaggtttttaagtgcatggtttaggttatactgaagtgtcaaataccatccccgtaatttgcagtagattaacagcatattttagcacacataacagtgttattgagtgaccaagttgaaaaagcacctcctttgcaagtggtaattcaggaactcagagttttttcattatttgccttcaccatccatgagtcttggttgccctttgtgctcagtccccttaaaataaagtactttaagaaatacatgtgggaagatttaatggactcaacttaatgtggttcacatctgtctcactccatcagcattatcaataactggtcacatttccacatctaaggcaaaggaggttaagaaatgtaattcatctgtgcctaacaaaaggaagaatagatttttatgaacgacaagagttttctgttacaatatgtcactcatatggatttactgtgtttctcaaatatttattgaacatctattatagccaagtaccgtgataagggctgaagggaggacagagagctgagacagcagagtcctagtatgagagaaactcacagtctaagaaaataagaaaatacatggtatgaagtgcctgctgtcataagaaagaaaagaataatgtgaaaaggctctgaaagtttagttaattattctactttgggaaacttcctgaagatgatagcaagtaagatccactctcaaagataagtaagatttagttgatagagaaagatggatgcagaaatggttgagcaatggcagggtgataggatgacagaggtggctaccataacatgggacagaaagctttattaacttggcagtagggtggggtagggttggaattatcccaaagtcaatccttactcaaagtgaatcttttcactctgatctcactcatgttggaatagttctacaagctcttgtgagactgtattgtacactgtgggagtgaagaacagagtgtgggtgactcctaccttcatagaatttaatatcccatttgtctcaatatagccagtgccaagagtcatttacatagaagtttcaaatgcttgagagagactggcctctgaactaaaaagagatctctgtctggacacaggtggaactgtaaaatgttcactctttgtccccagttcgttttcatagaattcttcatacctgtttctatgaggaatgaactggatgtgtttgaagacaagctgaagagctacgttacctctgtgaacaaagtggggatgctggctccattaaccctgcaggtgaaaaagctgatcaaccccaggtcatattttgtaaacatgtttaaggctaaattaaaatttgaacatgctctaagaattttttttcaatagcctgtttatttttaatgcctattggaaaaattgaaatgaatatttaatttcaaatttggacaaaataaaacaccaaacacttttttcattaagatgctaaagaaagtttatttatatcttttgaactttgtcttaaattcatttgtatcttaaaatggaagctttctttgaaaactacatattctagctcactgacattgaatggaaagctattaactattccccaatgaggaaggatcttctaaaatggggctaaaatacatgaaataaatggtttccaatagctcctgcagctttgccaagtccatgtcaaaaaattacatgtatgggtttatttcctgacttttaattctattccattaatgtgtttgtattgatcttggatcctacaactttgcagaatttgattattagtgttaacagttctattgttattaattaggattttaattttatgtataaaattataacatctatatatagaaataagcttttttcttttccaattggagtgtttctgtttttgtgttgcccaattattctggccagatttctattacaatgttgatcagaagtgaggaatgcaggtatccttgccttgttcccgattttagggggaaagcttttaatctttcatcactgcatataatggtagttttgagttttttatacgtgccttttattatgttgaggaagttttagtctatatctagtttactaagtgctcttatcataaaagagttttggattatgccaaattttttctctatcaattgacataatcatgttttttgtaaaattcattctattgagttggtatattgcactgattgattgcaatttttaaagaatttgagaaaaattgtagttacagcttttaatgtttaaaacaatttatcagtggagccatctggttccagacttttctttgttagtatgttagtatgtttttgataacttatgcggtcttttacttattacaaatggtattagagttattcagagaaatagaagcaatagaataaatatctacatctatactatatctttgtgtgtgtgttcatctatgtatatgtgttaatatatgagacagagccctttagagttgtcttggtggtgtctgggcaggggtccttcatcagccatctctgggctggtttggagaaccctctgttcttccactcacctcatttcaatgctggccctttttggcagcagcaagcttctggccttcaagagagtaaacatggttaccccactaacacctttttgccagtctcctgtgtggagctctgcaaagacagtaactggtagacagacctggaagcctcagagctattcctggccatcactgctgctcctcataccccactcaaccttctgctccccagattaggcatagacttacgtctacacagaacttcagccttggaaagcaccagacgacagctccagggctcagaacaatctttgcaccagcacttgcctccctactttgccagccatgaccaggtgtgtaaacatgatgagccaccaggattctaacctcccaacaatctcttcctgttcaggatgagccagccccacatgacattcccctacacaccatatttgacattaaatatttatccttttgtatttggcttattttacatagtataacatcttcaatgttcatccatgtagcattctttttttgagatggagtctctctttgtcacccaggctggagcgcacagcaatgcaatcctgactcgctgctgcctcaacttccccgggctcaggtgattctcctacctcagatgatcctccctgtggatgggactagagggacacaccatcaagtccagtaaatttttgtattttttgtagagctgggatttgctatgttgcacaagctggtctcaaactcctagactcaagagattctctcatctttgcctcccaaagtttggggattataagcataagccaccacactcatgagcagtgcactcattttaaggttaaataatattccattgtacgtatataccatattttctgtatctgtttatttcttagaagatatctgggtttgtttttacatttagtactataaatgatgcttctataaaaattggtgtgaaagtatcagtgcataagtgaataaaattttaaaacctgaacacatctctgcatgcagttcttagattgaataacagaggccagacacggtggctcacacctgtaatcccagaattttgggaggctgaggtgggcagatcgcttgagctcaggagtttgagaccagcctgggcaacatggaggaattccgtctctactataagtacaaaaatttgctgggcatggtggtacatgctgatagtcccagctattcgggagacggaggcacaagaattgcttaagccctggaggcagaggttgcagcttaagtccctacttttaattattttggagatacacctgtaatggagttgctggaacatacggtaattctatgtagaactttctgataaactgccaaactatttttcacagtcaataaaccattttatattctcaccagcaatacaccagggtttcacttcctccacatcctagctaatacttgttctttttcatttctgttgttttgttttttatatagtcaccctaatatgcgtaaagtgatatgtcattgtggttttgcatactaagaaggcaacctactttatcatgatggattatctttttgacgtgctgctggattcagtttgcaagtattttggtgagaggttttgcattaattttcatcaaggacattggcctaaagttttctattttcattgtgtctctgccagggtttggtgtcaagatgatgctggcctcatggaatgagttggggaggagactctcctcaatttttggggatagtttctgtaggaattgtaccagctcttctttatacatttggtagaatttggctgcaaatccataaggtccggggctttttttgattggcaagctacttattactgatgcaatttcagagcgtggtattggtctgttcatggaatcaatgtcttcctggctctgtcttgggagggcatgtgtgtccaggaatttatctatctcttctaagtttcctagtttgtgtgtatagaggtgttcacagtagtagtactgaccctacagaaataaaaacaaccatcagaaaccaataaagttttaacatcaattattttcatgtcttgaatccatttttatttaatttttgtacatggaatgtgataaagattcaattttacttttttgttgttttgagacagagtttcgcatcacccaagctggagtgcaatggtgtgatctcagctcgctgcaacttccacctcccaggttcaagcaattctcctgcttcagcctcccaagtagctgggattacaggcacctgccacaacacctggctaatttttgtatttttagtagagatggggtttcaccatgttggccaggctgatcttgaactcctgacctcaggtgatccacctgccttggcctcccaaagtgctgggattacaagcgtgagccaccacacccggccaactttactgttttaaatgtgggcttgttttccgagaatcacttgttgaacagagtgtctttctttacaaaatggtttaggcacccttgtcaaaaggcaaccaataatttatgcaaggttttttcttctgagttatctattctatttctttggtctctatccttgttcttataccaatatcaaactgttttaattacagtagctttgtgtgttctgaaatttaaaattgtgagcctttcactttggtcttttcaagattattttggccattcagagtaccctcaaattccatataaattttagaatgggctattccatttacgcagaaaaaagttggaaaaaataaaaagttgggattacatttgtacactactttgggtaatattgtcatcttaacattattaagtcttccagtccatgaacatggaattccttgacacttatttaagtctatttccgaaatattcccatcctgtagtcttcattgcacaggtttttacttcctttttaaatttatcgctaagtattatattattttaatgttgttgcaaacaattgttttcttaatttcctttcaaatagttccttgttggtatatggaaatgcagtttatatttccgtgtagtaaaaataattattttgtctttcaaatctagattagcgattcactcagaataaatatgctgtatacattggtagtcatttaactttttccaataagctaaccaatttcagcatgttctaaatatgtaaaaatgttaaattgtgttttattttcatttactctcagctgtcattcactcacccagaattacattacttcacacaaagaacttccattactgtaaagtccctggtaattgtatttcttcctgtatctttcaatctttagcaattccacaacacaaaacaaccaaagttagtctttatgtcaaaaatcttcaatggatatttttcatcagaggattccttagtgcaacatttaatggaacagatgcatgctgctgaaatataattctccaaaagtctcttagagtttgttgttttgttatttattacatcatatatctgtcctgttccagattatttttcaaagatttttgtacacaaatagcctggaaaaagagtagtagtttttctcttcaggtgaatgacagataaattactcaaccaatatgataaagacaatgtttgtctgtgaggcaaagattggacaggtttgcatgtgaactactttaaaaagattagggtttctttatcttgagattactcggctgtgacacaaatctttcccatgtgcaatgtccatctgagccttttgaaatcccttttaaaaatcgagtatagacagggagaactaatacaaatatgaagcttttgccttcagttatgcagaaaataagtaaatatttttgtcatacttaagtgtctcatgccttttaccagcatccatgaaactagaaggtttataggttggtttacaaattaggtagaatctacgattcttcacaattatttagttttggtgatgaaaatatgatgctgagataaacacaactttctaaaagggggagagaaacaaatacttgaagagttttcaagggaatatgagaagtctccccaggtccaacagcaaattctctgagccaagtggttagtgaggtgaaacaagagctctacactctgctgtctgctaaagaggctgatgtgtgggaggattaaaactaggagcctgagtgctttgcatgttcatgtttctcctgctagaaggatcaagcagtctttaaagctgatgttgaggcttggttgagtccaaaacactagaagtttatgcggttgagctatgagcagtctaaaggctgctaaaagctaaattaaatgggtcttgttagtgcctttttttttttgagacggagtttcatgcttttcacccaggctggagagcaatggtgcaatctcagctcactgcaacttctgcctgccaggttcaagtgattcttctgcctcagcctccttagagctgggattacaggcacctgccaccacacccagctaatttttgtatttttagtagagtctgggtttcaccatgttgtccaggctggtctcgaactcctgaccttgggtgatccacccgccttggcctcccaaagtgctgggattacaggcctgaaccaccacgcccagccgttagtcccttctttacccagatgaaggttctcactccctctgcactcctaaattttttccttcatctatagccaacttaagcaactttaaatattaaactacataggattggagatttggagggggaaactcaagcttttgtagttccgttagatacaggtatccaatttaccattctgtgtagtctcctagggtgcacagggagatataggtacaagggtgggtggaagtgctgacaagtgtagggtcaagaatgattacaaagtggtagaaagtaaaaagttcttaatcctgggtactcttaaaatgtaaggcatcacagaccttagtatagcaaaccaagagagaaaaaaatctaccaaccacccaatccctctgcatgctaatcacttctggccccttgcgccctcatgctcctgcccaggggatagtgctatcctactttagcccttgcctcaaacaaatattaaacactacggtctgtgcttacatagaaaaagctgagcagagggaaaaataagttggattaattccacacatgcttcatgactctcataaattacaaactgtagggtggacatattaacaatcagagttctgtaaacatagattttattttattttattttattttattttattttatttatcttattttattttattttattttattttattttattttattttattttattttatgtttgagagagggtctcactttcacccaggttgaagtgcagtggtgtaatctcagctcaatgcaaacttcatctcctgggctcaagtgatcctcccaaatagctgtaactatggatgtgcaccatcacacgcgggtaatttttttactttttgtagagatgtggttttgccatgtagcccaagctagtctcgaactcctgagctcaactgagccattcacctcagcctccaaaagtgctaggattacaggagtgagccatcacacctggcagagttctgtaagtatagattttaatgagcattatgtggcaatagatgttcttagatttatagacgtaaatatttaattgatattaagtacaaccccaaggctctttttttaaagttctctgattactactgtgagttaggcaagtcaagtcagatccttctgctttgactgatgataaaaataggcagagagtgtgagtcaccaggcagtggggagcagagaaaaaagtttggactgtacttcattgatctatttcttctctgattggcacttttctgtctctccacaaagttcaacaacttgtgatttttcatagtttgtgtctgaagtgtccagaaatgttaataggttccagctgagctttgcctttggaataatttactatctgttgtctacagaagaaaatatatgcagctatttaaggacatattatgtgccaagcactgtgttaagcagtagcttacaggtgcgagttgacttaatctttagggacactcaaggatcaatggactcattattccaattttacatagaaggataaaatgttgtctcattgtgagtggctgcttagaaagaataaatgaataaccaaagctacatggctggtaagtggtaaactggaatctcaaaaaccaatcatttaatcctatccttttggcaagctgagcagccccttgccagtggtctaaaacaatgccaggaaaagagggggtgacaattgtgcatttgataaacaggtaaaagcctggtgttgatattcagaaaaaaaactattcaattattgtaacacttgacatccatttttaacttaatgcagcgcataaaagtgtttacaaaagttgcacatgcttttgagatcaacatttgggagggatttacatagaatatacatttaccttaaaaaacatgcttagccactggtaactctatgtctatcaaattaggtgtttcaactaagaatgagattgctaattatgtttttaatatattttaaataagttcagtcattactattcagtgatcactaataacaggttggatacatcttagaccagatagcacatgtgtgagtgtgagtgtgtgtgcaatgcatattttgcctacgtttctgtatataatatatatttatctatatattatacataatatatataatatatagcatatgtaaagataatacacagatatatattacatgacgaaaacatgtattctctttgtattagtgtttaatttactagtgtccagaagaaggaaagaatacatttcacaagtaaaatcaaagcactacttttttttttttttttttttttttgagacagagtctcgctttgtcgcccaggctggagtgcagtggcccgatctcggctcactgcaaccttcccctcccaggttcaagcaattctcctgcctcagcctcccgagtagctgtgactacaggtgcctgccaccacgcccagctaatttttttgtatttttagtagagtaattaagtaaaattaacaagaacataattttttttgtatatttttgtatatttcgctattgtttttcccatcaggttttaatctttatttacaaactcttaccagctggtcctggtggctcatgcctgtaatcccaaaactttgggaccccaaggcaggtggatcacctgaggtcaggagttcgagaccagcctggacaacatggtgaaaccctgtctctactaaaaatgcaaaaaattagtcaggtattgtgtcaggtgcctgtaatcccagtgactctggaggctgaggcaggagaatcacttgaacacggaaggtggaagtttcagtgagctgagattgcaccattccactccagcctgggcaacaaagagtgaaactccatctcaaaaaaaaaaaaaaaaaagaaagaaaaagaaaaagaaaaaaataaaataaaaactcttgtctttttaaagatctattctagactctccacccaaactcaattaccaaaactctaggtttctgaggtgtttgattttcgttcctgactcctgaatagcacctctgaacctacctagggcctggagagccttgccaaactgaagggggaaatacaggcctggctgcctttttcacctgctgattgtagagccacagcgtcttgagtgaacatagggagtaaccaggaagctgtaacagcaggccttgggtaagaccaagcactctgctggattcaggtctgacctaatgcagtcatagttgtgatggccacagagatgcactttcatgtgtctcagaacacacacacacacacacacacacacacacacacagagaaactccatttgtttgggagaaagtaagggaagaaaagaagagtctctgcctggtaattcagaaaattctcctggatcttgttcaagacaatcttgttcaaagccatcaaggtagtacctctgtgagtctgcaagaaccacattgttaccgggcttgaggagtcccctaaagtagaaaaatcttagatcacaacacccaagtcctttcaaatatctctgaagccttcccaagaacaatgactacaaacaatcccagggagtgttgactataacaaatatcaaaatcttcaatggtgagacacccacaaagatctactggcatcaacaaatgatttaaaataatacttaaccaaatgaactaaaaaaggaaccagggacgaatcctgcagaaacagaaatatgtgattttcctgatagaaaattcaaaatggctgtgtcaaggaaacaaagaaattcaagataacaaagagaaggaattcagaattctctcagatatatttaacatgcagaaaaaaataattttaaaaagagtcaaggagaaattttggagatacaaatgcaatgcaataactgaagaatgcatcagagtcttttaatagtagaattgatcaagcagaaaaaagaattagtgagcctcaagacaggctatttgaaaatacagagtcagaggagacaaaagaaaaaagaataaacaactcacagtgtagatctcagtccaaggctgaggacatgagaacctggaatttcacttgtgtaggtcctggagtcaaaaggcctggagtcctggagttctgatatataaggataggaaaagaagagtgtgcccgaatagggagggagggagagagagaaagagaaagagagagagagagagcaattcttctatattgtcttttcaatttttttttaattttatttttgagatggagtttcactcttgttgcccaggctggagtacagtggtgtgatctcggctcactgcaacctcctctccccgggttcaagttattctcctgcttcgaccttccaattagcaagtattacaggtgcctgccaccatgcccggtaaattttttgtatttttaatagagatggggttacaacacgttggccaggctggtctcgaactcctgacctcaggtgatccacccacctcggcctcccaaagtgctggtattacaggtattagccaccacacccagcctttcttccttttttgtcttggctctttactaattgtatgatttctgcccacattaagaatgagtctttcccacttagtccactgaaactcacatgctaatatcttctgtaaacaccttcagagacacaaaaaataatactttaactgtcctccaggtgtttttcttttcagacagggtcttgatctgtcacccaggctggagtgcagtggtgtaatcattgcttactacagccttgactccctgtgctcaagcaattctcccacttcagcctcctgagtacctgagataacaggtactggccatgatgctcagctcatcctttttcttttatgttttgtagagacagaatcttatcttgctgttcttgagctcctaggctcaagcaactgctcctcaggctcccaaatgctgaggttacaggcatgaaccaccatgtatgcctggcagtctccaggtattccttaatttacttaagttgacaactaaaattaattattataagtccaccactcatcaccttgacacttatacatatgcccttatatcatacctaatttccaaatgacgacaaaaacaaggtaatagttttaacaaatataaagcatctattccaagaacaacgaaaagtgcaacagtatcttttccagaagatgaggtaaagctcttggaccatgttaaatttttcctgattaaagactatgatataaaattaacaatatttaaatactgacataaacataataaacattgtattacataacaaagaataataaaagagcaaaaacaacaacatttgcttaatatatgtctatagaaacatgaacatagtcttaactatataggaagaccatccacatggcagttatagtcctcatttctatcactggtcatttggttgtagcttgtatttgtaacagctttcttctgtccactccatattacatttaacaagcacctaagctggttatggttctttactcagagttgtgacccaaattttattcctaatgtttcttggctgtttttagtttttcctggattgggttcttgtaatttcccattgaccttaattacagttcattctaatactatgtatttcagacatacttttcattattccattgtggattagtattctaacttttcccttggtattccagatttatcaccccaggtaacactataactcccttctaagtctgttgactgagaggcatgagaaacacaaagtggcacagtggcattcttaactttcagttcaatttaataacttttaaaatcttttgttggaagcagtacttcctctggaactgagacctctaggccacctctaggcccagtcatgggagcagagccaaaaatatttctagaaggtcatgaggggaaataatgagtgatataactcccattttcacctcttcatttttggactcataaatcctgactatgggaaaatggtaccataggttggacgctgatgcagagcatatatcaccttctgaagaacctggcttcattgttaagaagtattgtcacctacttggtgccataaccaacatttcaaaaggtcatttatcattccactaagccagttgcttcaggataatggaaagcatggtaagtctactgaattctataaagatgagcacattactacactttggctgtgaagtgagtttcttggtctgagcaatgctgagtggaataccatgagaatgcataagggattccgtgagtccatagatggtagttttggcagaagaattccctgaaggtaaaacaaatttatatccatggcaagagcctactccaatgagtataaactgttgccccttatattatgaaagttattcaatgtaataaacctactaccagctacctggcgaatcaccctagaaatggtgtcatatcaaggactcagtgttgttatgtgctgctgtcagatttaacactcagaactggctgtagccagactggcctttgggattcaaagttgatgctgcttatcccatgcattgcttctatttctgctactatgttcactttgttcataagcccactgggtgatgaagagggtggcagggaaataagaataactgatacccacagaacaagtcattctgtccatgtcattatcaaaatcctgctctgatgtggtcatcccttggtgggcattcacatggaacatacatatctttatgtaacttacccagtgagaggggtttatccacaaaattctttccaattttttttgtcatgaattgtgtaatcatgttccctacatgtcgctgaccatctagccaattcatgggccacagcagtgttgcaggattggggatcataagatctcaaactcctggtctcaagcaaaccctgcctcagcctcttaagtagctgagactataggcgcacaccacaacgcccagctaattttgttgtatttttggtagagatggaattttgctgtgttttccatgatggtctcaaactccttgcctcaagcaactctcccagcttggcctgcaaagtgctggaattacaggcataaaccatcacactcagcacctataatttgatattttaaacaatactatctagtgaaacctataacaaagtcatgtagggaaagaaagctcactaacacagtgtaaaattgtatggatatgatgcatgcacatgtgtgcatacatgcttgtgtgtgtgcgtgggtgtgtgttttccgagaaatggtactttattgctacaaggctaggatagcattcatgttcatctggtgatgtcaaatattgaaattccaggattcacataacaagattcctaactcattcacaacacggtgaacactgtgaaacacaattgagaaatgggcactttggaagaaacaactggcctagggacaagagacagtgtgcaagccatctgctccatgaaatgctttgttcagagcatgcatttcatgcacttcattccatggtgacagatattgctactctgaggtcgtgagacattgaacctaggatttgctgtgaaactctatagactgaacatctgtctgcagtatctcctgcctctacccataacctgtgccacacaccagtggcgcactcttctctctggataaatgaaagttctggatgatccgatgtgcagagaattaggctgtttttcccaggggctctagttgaatttttttgggactgtctgggaggatgccctccacgttgtccaaggggaatcacgagaaaaccggtgaccccatgtgcctccattccctcccccttcctcccctacccctccatcagggatcgcatttattccagaatgatacttgctttcattgtcattgggagtcacctagcagcgaccgttattgaaaatttaagcagcatagaacagaaaaagctctagtcacctgtgcacagcttactgcaatggtgaacttctgggcttaagcagtcctcttgtctcagcttcctgagtagctgagactataggcctgtgccacaatgatcagcaattttttcaagtagtgataaactctctctcttccaggttgctctggaactcctggcctctagccatcttcccaccttggtctccagaagtgctagaattacaggcatgagacactatgcccagtcctataatttgatattttcaacaatactatctaatgaaactcattacaaacacatttggcaaaaggaagctcactatcatgatataaacttgtagacatatggtgcgctcccacgagcgtatgtgcctgcatgtgtgtctgttttctgagaaatggtactcttttccccaggggctgtggttgaagagttgtggggactgtctgggagggtgccctgggctcagaaatgtaatccaagagagatcagaagaccggcgaccccatatgcctccatccccttccccttccacgcccacccctcaacaagggatcccactcattccaggctgacccttcatttggttgtcatctggtgtcacctagaggtcactgttattgaaaacataggcatcccatcaaaactcctggctgcctgcacacagccagggaaaactgtggtttcccttgggccccacgctgacctcggtggcactcccgccctccctccacccactgccttgttgcctaaggaacctccaccctggctaggccccattgttcttttatcatttgtgtttctttttccttttttttttttttttaacaagcatagactcttcttccttggttttaaaaatggtgtgaaaggaaaataaatcttggggcttccaaatcactagctaaagggaaaagtcaagctgggaactgctttgggccaacctgcctctcattctgtacaaagtcacccctctgggcgcattggctcaaacctgtaatcctagcactttgggaggctgagggggtgtggagcacctgaggtctggagttcaagatcagcctggctaacatggtgaaactccatttctactaaaaatacaaaaattagccaggcatggtggtgcattcctgtaattccagctacccaggaagctgaggcaggagaatttctggaacccaggaggtggaggctgcagtgtgcagagatcgcatcactgcactccagcctgggcgacagagcaagactccatctcaaaaaaaaaaaagtctcccctctgctcacagagatacatgcatatctgattacctcttttgtaaaggctaacagaaactcaaaagaatgcaaccatttgtctcctatttcctatgacctcaatgccccctccccactttgagtcttcccacctatgcttcaagttttcccgcctttgggtcgagttttcccaccattccagattgaaccaatgttcatcttgcatatgttgattgatgtctcatgtctccctagaatgtataaaaccaaactgtgctgtgaccaccttagccacatgtcgttagagtaccttgaggctgtgtcacgggtgtgcatcctcaaccttggccaaataaacatttttttttttctgagatagtttcactcttgttgcccagactagagtacaatggtgccatcttggctcactgcaacctccccctcccaggttcaagcgattctgctgcctcagcctcctgagtagctgggataacaggcacccaccactacgcccagctatatttttgtatttttagtagagatgggatttcaccatgcctatatttttgtatttttagtagagatgggatttcaccatgctggccaggctggtcttgaactcctgacctcaggcaatccgcccaccttggtgtcacaaagtgctgggacgacaggtgtgagtcaccgcgcctagcttaaattgcgatttttaaaaataaatgagtttccaggaaaaaaaaatgaaaaaaacccacagtgaaacatatgcctctcgacttttgaggcagcaacgacactataaaattatatgtcgttccttaactcagctcatttcttgactggggaccataggcatttgggccacttcctcatggaacttacttgtgcttcagggtctgttcagacctgatcaggtccacacagcttctgtgttatgctgaagtgctgttgtgcacacccatttacagccagtttgtgatgagcagctcggttcacatggtaacttcatggccccacggttgggcattttgtttctactagcagccagagaggttagctgagacagaatcttctcttttgccgatggcagcatgggaatgaaggatgtgataggcatatttggaatttgtataaatgttgacttgtttacctttgggaagggttagggctctggtgagagctataagttctgctttttgggaggaggttcctggaggtaagggcctggctttaattacttggtcaagagaaacaactgcatatccagcaattttgggggagccagtgggcctggaagaggagccatctatgaacagctggtcactggggttggtgagagtcttggaggaaatgtttgggaagtgtggctgcaggtggtcttggatgtcagtgcaagaataagtaggaagggaagaggatacaagaagtaaggatgctgggttgaggggagcacttttggcaaggcagaatttgggatttttgataaagaggccatggagtaattgaatctgggaaggaggaagagagcttaatgcttgggaggagaggagatcttgtagactatgaggactgtagaccgtggtattttggctgatgttagtttcttgctttctagagctaaaactgtggctgctgccagtgctctaagacaggttggccaccctttgactgagttgctgagttgtttagagaggtaggctacaggagcaaaggaagagggattttgtttttgttgtcctgagacaccaagggctattccttggtttttggcagtatagagagtgaaaggttgggatatactaggtaaggacagagctggtgcagtgataagattggtttagagtttgtggaagttggggagtatgttatgtgaggagtttaggtgtttgttgaggggtctttggctgctttacaaagggggcaagctaggagggcaaagttgggaatccatatttttagaaagcctgttatccctaggaaagaaaggattttgcttttttaggaaggtagagataggctgactattaaggctgctgatgccagggtcatggcttgggacctgggggagagttgaagtcctaagcaggtcaccataggggtggaaagcagtgctttggagggggagaccctatggcctttattagtaaggaaattgagaagggtggcagcatgagtttgggagatttttaaggaggggctacagaggaggaggtcatctacatattgaagaaggcagctggaggaaagatttaaggaggtgaagtcttgggctagggcttgcccaaagaaatgagggctatccctgaagacttgagggaggacagtccatgtgagttgttgtgactggagagtgttggggtcagtctgggtgaaagcaaagaggttttgggaatcagggtgtaggggaatggtgaagaaggcatctttcaggtcaattgttgtatagtgggtggtgttggaggggacaagagagaaaagtgtatagaagttagggactacaggatgaatagggaggacagcctgattgatagctcggtggtcctggatgagtggtatgagccatcagatgttttaatagggaggatgggggtgttatacggagagtgtgttggtctaagaagactgcatgagcagagcttgtttatgatgggttgtaagcccttttggtatgttagggaaatggggaattggggaacattgggaaatttagagggttgttttaactggattttgatggggtcctagtgagcagctatggaaggggtggtggtgtccacactactggattaatgagggaggcggctagcgggtgctggggaggagggatcagaggctggactagcagagaggagcaggagagactctggttgagggggacagaaaaagttgatagaagccttgaatttggctaaaatgtctcggcctaggatgggggtggggcaatgaggcatgataaggaaggagtgtgaaaaaacagtattaaatagggaacaagtaagggattcagtagtgcatggacatgagaagagtacatcaacccccacaacagagacctgggaagggtaaatgggtcctaaaaatacaagtaaagccgattaggtggctccactgttgattaaaaaagagatcggtttacctgctattagcagagttaccctgggctccaatgcagtgacggcagatggggccgggggccctgggctctgtcagtctccagcagccaggccaaggaggtgtgggagtgtgagtgactcttcactctttgatttgccagggctttgaggaaccggcctgttagtctacttgttaagaggacaatcagacttccattgactggtttgttggcaggctgggcaaggagtttttggtattcgtgggttagggcatgttcaggcctaatggccttctttgccacacttaaaacagggcccaggagggtcactgctattgggtcttttgagcctctgggcagcctgggtagatagctgctgctaggagctggtatttagcctgatcttgttgggctttatttaatttattttgcccatctctgttgttgaaaaccttgaaggccaggataagaaggtcttgtagagggttttgatggccatcttctacctttttgagcttgcgctgtatgtcaggagcagactgagagatgaaatgggtattaagaacaatagttccttcctgggaggtggggtcaacactggtgtatttttggagggcctctgtaaagcgggaaagaaatttggcaagattttcattggccctttgggagatttttttttttgagttttttaaagtttacggccttgtgggcagcttcgttaaggcctgcaataaggaagtgatcatgtggttatgagatgccagccgggctctgtgggttggtactcccaggaggatttttcccggggaaatgcagcagcctttatgggcttaggagggtcttgccaatgaagatcgtcagcatgtgcctgagctgcaagctgcactcttttctttgtttttctgggaggaaagtagaagaaaggataatatagagatcatgccaagtgggtttataagattgagtgaggtatttgaactttttgatgtaagtgtcaggattggaggaaaaggacctgagaccgttcttaatttgggaaaggttggagagggagaagggaatgtggatgtgaacgaatcctttagcctcagccacctctcggaggggaagtaagggggccgactgttgggcatgctgagtccgagagcaggtatgaagtggagatggggagcaatcagaatcagaagttgggtggttaggagagaggaggggaaagaggtaaggcaggagcgggagcatatggtggaggattgtgatgatttgggggaggattatggtgttgtcagagagaaggaaagttggcagggtcaaagaaggaggaattgtcactaggagtggtggaggggggtgtttgaggatgggtcgggtttggagcaggcgaggaggatttggaaagtagagcaggactgacagagggagggacggctacagagggcaaaaaaaagcctgaacataagggatctctgaccactttccattgcgatggcagaagttgtctaggtccctgagaatgttgaaattgaaagtgccattttcaggccattgggagccattgtctagtttatattttggccagggagtgttacaataaaagatgaggtttttttggccaaattttggaatggaggataagggcattaatgttacagaggagatacccaaggggcgggggggggatgtctttgagggagtggattgggaggctcccttagtgaaatgagaaagggaggggtagagacaggagacttggctagaatggtgggagaaggcatcccttgtcccacggttcaagtcggagaagtgcgataatcctccgttcaggcatccccgaaagggagataccaagggcctagaggccgggaggaggaaacccttggcccagtgctaggtctttcaggaaggaaagagtagacaagggttccagaccgaaggcaaaagtctcctttactcacccctgaggtggtcctggtgtcggatgtgttcaccaagcgatggaaaggctgtatgagatccttgggtctctagcaggttctggaaggggtagttcggccgggggaagaatggagggaaggagaaagggagaaagggaggccaaactctaccaccttcctgagtttcagcaccagaaatgtaaggtcagctgagagaaaggatgaggagacccaaagtcagacaagcaagctttattgagctgcttggctgctccatcacagttagaggaggcagccccacttacagactatagcagggttttacagggccagaaccaggtcagggtcggggagctgagtcggggcaggagaactgggtcccagtagaggagctgagttggggatgcaggtgtctcaactgcatcctggagatgttttttgccagctttgttatgcgaggttaagagatatgttaaccgcatcctataactgtctggacaaacagatactggagggctcagtgaaggcaggggtttgtcttttgccctggggtagctgtgtggagagcacaagggagtgtattgtgaggcctgtgggaggggaagggtctggtcggggtgaccctaacagggagttttttcagacccccaattaaacttatttaatcttaaatggtcctgttaagaattccctcatcatcttgtcatgctccaaggcaggcccaggaaagtcctagtgaaaactcttggtggacttttgcgacattccaccctttgcaagagtgcactggttctctcagcttttaatatttaacttagccacttggtcagtactgaaacggttgttgcagaggcccgccttagttagtgagacctggcctgccacacacacaatggggcaatctcggcttgctgcaacttctgcatcctgggctcaagtgattctcctgactgggcccctccagtagctggaactacaggtgcccgccactgcccccagctggagctacactaactaatgtataggaatagattgaaatagagatttctccacaacagtgctggatgaacacctcaaggggatcacacaacctcttccgggacgtggtgaccattgtttctgtccgtgttcaactgagttcaaatttgatatttaagttttcctccacattcggcctcaatttgatactcaattgtaggaaaatacccttacagatacatggggaaggcacagttgatatagattacagatacagggtaagcacaggagaattaaaatcacaattaataaaaaccacacccactatggccaatgccaatgccagttggatagccagtccttgatggggtcctactggttagattccaactgttttacctgtttttgcatgtcttgggcaagaagagtaatactgtgagaattgtcagggatatacacacaacattcagtatgcagtaaggagcaaaactctccttgggctgcagtaagcatatctaatgtcattcgattttgcaacacaacagtatgcagctcagcaaattcatcgataacaacataaatccagtgctactctcaagagctttttctacatggaaacttaatattttaatttgttgctgaagcaggattgtaccagcggcaggggagaatactgtgatagggtaccaccaccagggagtctggcgcattcacaaccagcaatgtttgtaagcatctcaattactggggaggggaatatcatcccagatggtgaatggaattaatggccacccccaatgcatcttcctgcccagtgtgggggcaggtatcaccatctgtaggatctgcatacccagagggccctccagggaacagcaatggttttactataattatagtgtattaaggtgttattaaagtaggaaagagattgtgtttcattaggagcagtgtcactgatttggagtatgtgttgacaattgtctggaaggagaaatgccagagtgccattggaggagccattcaaggcctccaaacaaagcggaggctatatggagtccagccaccaacatggcaggctctaggtatatgccattccaggtatattgggcagaataccaaggcttctgacataaggcaagggtggagttaatcttttgtccaacttgagcaaagacagaatgcttggtttggccaaaaaaagtctgggttcgattgcaagtgttgttgttgtggcctcattggtgccgacatagcattcagaaacatcggcagggatgattctccaaggtagtccatttcctgtggcctctggcaattagacacatagccagcattgactgcggttggcttctgttgcagtggtggctacccagttgatgaactcattcttggctcagacatgataacccaggtactgattactagcaaacaggttatcctctttaataagaaaaatggaggggcacattatattgtttttcctctttaggaaattgtactatgccttcattttctgctcccatagctacaaggttaccagacatagggacgggatctgatggacactgtacccatattttggctccaggatttaagctacttgtaccagtggatccgaatcccccagttccataagtagcctcttttggggcagagatttcctcaggggttaattgttgacaaggtgtcactaacaattgagaaacccgcatctgcagttttatagcaaaagaatctggagtggtattgtataaaatgaccttcaactctccccagtaatcactgtcagttatgcccccatgtaccgtaagaccccacattgcaagacctgatcaggatgtaacccatctgcagtgtttgcgaggtattataactcctaggcctgaggccaccatgtatgtactttgggcaggaattatcccagacttgaaactatgtaagtccaagccagtagcttctattgtactctttcatgggagtatagcctccgggtggattttctagaattttagcgagagaggttggactacactggcacacttagcaatttgtaggtgtggggtaagcatttggctcactggggtttcagatgttgttaatcgccaattgtttaaattttgtaatgtgtcaaacaggtgatccttccatttttctaacttaccttgccctaacactttcaactgtttgttcaataactcattcattctttcagttaaaccagctgcttgcaggtggtaaggaatatgggaaaatccattcaatgccatcttgggctgcaaaggtttgtacagcttcacctttgaaatgggagccattgtctgtttgaatttgtatgggcacaccatcatatagaattaggatatttcatgttttaatagtgttaatttggttagcattagcataagcacaggctactaggagccctaagtaggtgtctacagcagtacatatatattggcaccctttagaaagtggcaagggacaaatatagtccatttgacaaatttgtcctggcatttttccccggtgaatgtgccccatagccctttgaggaattggcttggtttttaactgttggcatgtagtgcattgggataaaattgtctgaactgcatcctggggtaacatccttctttacactccccaagccatggttccctgtacgcctaggtgtccgcactggtgatgcacccattgtgtgattgcagcccaatctacttcttccaggtctgagtcggcagtaatagtagaaattttagcttgttggtctgcctgctgattagtctgtcaagagaaagcaaaaaggcatgaacatcaacatggaaaacagtgataatggtagtgtgcaccagaatccagatatctacccagtattgttttcccctggggtttagggggtggagtggggctagaaagtcagtcccctacctttgctagctcagcaacgacatctgccgccccccggaccccttgcttaccctaacagatcccccatctccaccgccttggaggttgacctcttactttgctttctgtttttcttcctttcttgggcttgagcagggggtgcaggggcgagggtgtgtgtggggaaggggtgtggggtgaggagggaggggagtgtcctaagaatcaatttagtgtcatgcctctttcatcaccaccaccactgaagatgaaaccaacaataaactaaataactgcattctcatctatagccttccacctgcttgggcggtccgaactggagttgtgatttttttcccccttcgctcctgaggcctccctctgtaggaaagtttcaccctggctgggtctcaaccagtggacttcgtggtttgggtgaatgagggcagcacccctgcttggtgtccagccactctggttcccgcctcctcctcctacaccatggagggctcatcctcgggctgggatggggttctgggagcatgttggggacagctgaggcagtcctttaccaggggtggccgcgtgggcccaggggcggggtggggggggctttctgagttccagatctcctctgcactgcggcagggtgtgggcacactgggacttgggccactcttgtgcacccttcctccactttctgttgcccaggtctaccagggtgggggaagggagcgatggggaggtcccgtatgacttctggtcccaagtgtcccactaccctccaccctcagcatccggcctgctggccgctcctctgtcaggtctccgggtcaactagatgtcggccacgaacgccagacttagcctccggctcgccatgtttgaggtcgaccagcaggccctctcaccggagtgagctgtaaggagggatgctcagtgaaccaatcaagacgtgggccacggaggtcagcagggctctgggcaattcatggtcctgacctggcaagcaccactctgggacctgagcgttgcaaacccatctacacccgtccaacctgtgttggccggcgctcctcgctcgctcaggcctccgggttgacaagagttcagccgtgagcgcctggtttagccgccagcttacagtgtcggaggtcaaacagcaagccctcccccggagtaagcagtgagaagggaagcccggcggaccgagtgcaacacgggctgcagcggggagctgggttcgggacgggtcagagtcctgaccatgctggtatggctccaggccctgagcatcccacacccagccaccatcgatggactggccattcctcagtcactgaggcctccgggtcaaccagatgccagccacgcctgacttagccgctggcttgctgtgtccgaggtcgaccagcaggtcttctcatcagagcactggggagggaagcccactggaccaagtgagatgccctttgaggggtgagccaggctcaggatgggtcagggtcttgaaagtcctggccccgagtgtcccacacccggccaccttcacccaccagctgctcctcactccctcgggcctctgggtcatcacgatgttgactgccagcaccgtacatggccactggctcaccttgtctgaggtcgaccagcaggccctttcacaggagctgcagtggggagggaagcttgctctggaccctgtgtggaacagctgtcagccgcgggtgccatacttagccactggcccgtgtctgaggtcattttaagggcgagactcctggtctaactcaggtattgtaaggggagagacacctggccaacctcaggcattctaatgggaaagatgcctggaccaccacagccattataaggggagggtttcctagatgaactcaggcattctgaagtgagagtctcctggctgacctcaggcattgagtggtgagatacctggactacctcagaaattctaaggggagagtctcctggttgacgtcaggcattctaacagtagagactactggctgacctcaggcattctgtggggagcgactcctggccaacctcaagcattctaagaggatagtcttctggccgacctcaagcattccaatgggagagacaccaggccagcctcaggtattctaaaaggagtgattctgggtcaacctcaggcattctgagaagagggtctactggccaatctcaggcattctatgtggagagaaacatggctgaccttaggaattataaggggagagaaatctggccaacattaagaattctagtggaagaaacgcctgaccaatcttaggcattttaattggagagacatctgtacgaacttattcattctaaaaagagagacccctggctgaccacattctttctcatgaaacacctggccgacctcagacattctatggggagagtctcatggccgaccacatgcattctaataaagtagacacgtggaccacttcaagaattccactggggacacactgttccaagatggatgaataggaagagctccggtctgcagctcccagcatgattgacacagaagacaagtgatctctgcatttccaactgaggtacctggttcatctcattggtactggttggacagtgggtacagcccacggagggcaagtcaaagcagcttggggcatcgcctcacccatgaaatgcaagggcctgggggatttccctttcctagccaagggaagccatgacagactataccgggaaaatcaggacactgccacctaaatactgtacttttccaacagtcttagcaaatgacacaccaggagattacatcctgtgcctggcgcaggaggtcccacacccaaggagccttgctcactgctagtgcagcagtcccagatcgaactgcaaggcagcaagcctggctgggggaggggcttccgacattgctgaggcttgagtaggtaaacaaagcagccgagaagctcgaactgggtggagcccaccacaggtcagtgaggcctgcctgcctctgtagactccatctctgggggcagggcatagctgaacaaaaggcagcagaaacatctgcagacttaaacatcactgtctgacagctccgaagagagcagtggttccccagcatggcgtctgagctctgagaactgacagactgcctcctcaagtgggtccctgacccccatgtagcctaacttggagacaccacccagtaggggccaagtgatacctcatacagctgggtgcccctctggaatgaagcttccagagcaaggatcaggtagcaatatttgctgttctgcagcctccactggtgatacccaggcaaacaggttctggagtggacctccagcaaactccaacaaacctgcagctgagggacatgactgctagaaggaaaactaacaaagagaaaggaacagcatcaacatcaacaaaaacgacatctacaccaaaaccccatctgttggtcaccatcatcaaagaccaaaggtagataaaaccacaaagatggggagaaaccagaacagacaagctgaaaattctaaaaaccagagtaccccttctcctccaaaggattgcagctcctcgccagcaatggaacaaagctggacagagaataactttgacgagttgacagaagtaggcttcagaatgtcagtaataacaaacttctctgagctaaaggaggatgtttgaacctattgcaaggaagctacaaacctagaaaaaagattagatgaatggctaactagattaaacagtgtacagaagaccttagatgacctgatggcactgaaaaccatggcacaagaactatgtgatgcatgcacaagcttcagtagccgatttgaacaagtggaagaaacggtatcagtgattgaagatcaaactaatgaaatgaagtgagaagtttagagaaaaaaagagtaaaaagaaatgaacaaagcctccaagaaatatggattatgtgaaaagaccaaatctatgtttgattggtgtacctgaaagtgacagggagaaggaaccaagctggaaaacattcttcaggatatcatccaggagaacttccccaacctagcaagacaggccaacattcaaattcaggaaacacagaaaatgccacaaagatactccttgagaagagtaactccaagacacataattgccagattcaccaaagttgaaatgaaggaaaaaatgttaagggcagccagagagaaatgtcgagttacccacaaagggaagcccatcagactaacagctgatctctcagcagaaactgtacaagccagaagagagtgggggccaatattcaacattcttaaagaaaataatttttaacccagaatttcatatccagccaaactaagcttcataagtgaaggagaaataaaatcctttacagacaaacaaatactgagagattttttcaccaccaggcctgccttacaagagctcctgaaggaagcactaaacatggaaagaatcaactggtaccagccactgcaaaaacatgccaaattgtaaataccatctatgctaggaagaaactgcatcaactaatggacaaaatagccagctaacatcataatgacaggatcaaattcacatgtaacaatattaacctgaaatgtaaatggactaaatgcctcaattaaaagacacagacaggcaaattggataaacagtcaagacccaccagtgttctgtattcagaagacccatctcacaggcagagacacacataggctcaaaataaacacatggaggaatatctaccaaggaaatggaaagcaaaaaaaaagcaagtgttgcaatcctagtctctgataaaacagactttaaaccaacaaagatcaaaagagacaaggccattacataatggtaaagggatcaattcaacaagaagagctaactatatatgcacccaatacgggatcacccagatttataaagcaagtccttagagccctacaaagagacttagactcccacacaataataatgggagagtttaacaccccactgtcaatattagacacatcaaggagacagaaggttaacaaggatatccaggacttgaactcaactctgcaccaagcagacctaatagaaatctacagaactctccaccccaaatcaacagaatatacatcattctcagcactacatcacacttattccaaaactgaccacataattggaagtaaagcactcctcaggaaatgtaaaataacagaaatcacaacaaactctcagaccacagtgcaatcaaattagaactcaggatgaagaaactcactcaaaactgcacaactacatggaaactgaacaacctgctcatggatgactactgggtacataacgaaatgaaggcagaaataaagatgttctttgaaaccaataagaacaaagacacaacataccagaatctctgggacacatttaaggcagtgtgtagagggaaatttatagcactaaatgcccagaagagaaagcaggaaagatctaaaattgacaccctaacatcacaatgaaaataaccagagaggccagagcaaacaaattcaaaagctagcagaaggcaagaaacaattaagatcagagtagaactgaaggagatagagacataaaaacccttcaaaaaatcagtgaatccagaagctgttttttgaaaagatcaacaaaattgatagaccactagcaagacaaataaagaagaaaagagagaagaatcaaatagacacaataaaaaatgataaaggggatatcaccaccgatcccacagaaatacaaactaccatcagagaacactataaacacctctactcaaataaactagaaaatctagaagaaatggataaattcctggaaaaatacaccctcccaaggctaaaccaggaagaagttgaatcgctgaatagactaataacaggctctgaaattgaggcaacaattaataacctaccaaccaaaaaaattccaggaccagatggattcacagctgaattctaccagaggtacaaagaggaggtggtaccatcacttctgaaactattccaatcaatagaaaaagagggaatcctctctaactcattttatgagaccagcatcatcctgataacaaagccttgcagagacacaacaaacaaagagaattttagaccaatatccctgatgaacattgatgcaaaaatccccaataaaatactggcaaaccaaatccagcagcacatcaaaaagcttatccaccaagatgaagttgatttcatccctggggtgcaaggctatttcaacatatgcaaatcaataaacgtaatccgtcacataaacagaaccgaagacaaaaaccacatgattatctcaatatgtgcaaaaaaggttttgacaaaagtcaacagcccttcatgctaaaaactcccaataaactaggtattgatggaacatatctgaaaataagagctatttatgacaaacccacagccaatatcatactgaatgggcaaaaactggaagcattccctttgaaaactgtcacaagaaaaggatgccctctctcaccactcctatttaacatagtgttggaagttctggccagggcaatcaggcaagataaagaaataaagtgtattccatcaggaaaagaggaagccaattgtccctgtttgcagatgacatgattgtatatttagaaaaccccatcgtctcagccgaaaatcttaagctgataagcaacttcagcaaagtctcaggatacaaaatcaatgtacaaaaatcacaagcattcttacacaccaataacagacaaacagagaaacaaatcatgaatgaactcccattcacaattgctacaaagagaataaaatacctaggagtccaacttacaaaggatgtgaaggacctcttcaaggagaactacaaaccactgcttaataaaacgaaagaggacacaaacaaaaggaaggatattccatgctcatggataggaataatcaatattgtgaaaatggccatactacccaaggtaatttatagattcaatgcctccccagtcaagctaccaatgactttcttcacagaattggaaaaaactactttaaagttcatatggaaccaaaaaaagagcctgcattaccaagtcaatcctaagccaaaagaacaaagctggaggcatcacgctacctgacttcaaactatactaaaaggctacagtaaccaaaacagcatggttctcataacaaaacagagatatacactaatggaacagaacagaagcctcagaaataacaccacacatctacaatcatctgatctttaaaaacctgacagaaacaagacatggggaaaagatttcctatttaataaatggtgctgggaaaactggctagccatatgtagaaagctgaaactggatgccttatttacactttatacaaaaattgattctacatggattaaagacttaaatgttagacctaaaaccataaaaatccctagaagaaaacctaggcaatatcattcaggacataggcatgggcaagtacttcatgactaaaacaccaaaagcaatggcaacaaaagccaaaatagacacatggcatctaattaaactaaagagcttttgcacagcaaacgaaactaccatgagagtgaacaggcaacctacagaatgggagaaaatttttgcaatctactcatctgataaagggctaatatccagaatatacaaggaactcaaacaaatttacaagaaaaaccaaacaaccccatcaaaaagtgggcaaaggatatgaacagatacttttcaaaagaagacgtttatgcaaccaacagacacatgagaaaatactcatcatcactggccatcagagaaatgcaactcaaaaccacaatgagataccatctcacaccagttagaatggcaatcattaaaaagtcaggaaacaacaggtgctggagaggatttggagaaataggaacacttttacattgttagtgggactgtaaactagttcaatcatgtggaagacagtgtggtgattcctcaagtatttagaactagaaatacaatttgacccagccatcccattactgggtatatacctgaaggattataaatcatgctactataaagacacatgtatatgtatgtttattgcagcactattcacaacagcaaagacttggaaccaaaccaaatgtccatcaatgatagactagattaagcaaatgaggcacatatacaccacggaatactgtgcagccataaaaaaatgatgagttcatgtcctttgtagggacatggatgaagccagaaaccatcattctgagcaaactaccacaaggacaggaaaccaaacaccgcatattttcactcataggtgggaatttaacaatgagaacacttggacacaaggcagggaacatcacacactgggtcctgtcgtggagtgggagttggaggagggatagcattaggaggaatacctaatgtaaatggtgagttaatgggtgcaagaaacgaacacggcacaattatacaagcacatgtatacatatgtaacaaatctgcacgttgtgcaaatgtactctagaacttaaagtataatttaaaaaaagagggagagaaaaaaagaaagttactctgaaaaaaaaagaattccattgggagatcatcatggctgaccacagacattctaatgggagagatacctggccaactgcaggcattctaacaggggagacacctaactgaactcaggcattctaaagggagaaaaacctggccagccacattcattctaacaggagtgacacctggccgacctcaggcattctgggagagagacatttggccgacctcatttattctaaacagaaagacgtgtggccgactttaggaattttaacaaaagagacacctggcctacctcaggcattataacacaagagacactcctggctgacctcaggcattctaatgagagtgacacctggctgacctcattcattttacctggagagactcctggccaaatttgggcattctaatgggaaagacaccttgctgatctctggcattctaatgggagagacagctggcggcttcattctaacaggagagacacctggccaaccacaaacattctaaggagagagacacctggccaacctcaggcattttaacaagagagacaactggtcgacctcaggcattccaagaggaggatctcttggctgtactcaggcattctgattggagagactcctggccgatctcaggaattctaatagaagagacaccaggctgacctcattcattctaatgggattaactcctgcccaacctcaggcattctaacagagaaacctgggcaaccgcaggcattctaaggggagagcctcctggctaacctcaggcattctatgggaagagacccctggcagaactcaagcattctaatggaagagactccttgtcaacctcaggcattctaaaaggagagtctcctggttgtcctcaggcattctaactggagagacgactggccgacctcaggaagtcttgggagagacttcctgctgacttcagacattctaatgggagagaatcctggctgacctcaggcatcctaagggaagagacacctggccgacctcaggcattgtaatgggagagacacctggctaacctcaggcattctaagggaagggactcctggctgacctcaagaattctgagtggagaaacatctgccctacatctggcattctaaagggagggactcctggccgacctcaggcattctaacgatagactcctggctgacctgagacattctgagaggagagactcctggccgagctcaggcattctaaggggagagactcctgaccgacctcaggtattctgagtggagagacacatgtcatatatcaggcattctaaggggagaatctcctggtaaatctcaggcattctaatggtagagactcctggctaacctcagacattctgaagtgagagactcctggccgacctcagacattctaatgggagagacacctagctgacctcgggcattctaaggggagagacatctggccaacctgattcattctaatggtagagacacctggccgaacacaggcattctaaggggagagccacctggccgaccacaggcattttaaggagaaagatacctggccgacctcaggcattctaacgagtgtgtctcctggccgacctcaggcattctgacgagggacaactggccaacctcagggattccaacagggcagacacaacgttgacgtcattcatcctaactggtgaaactcctgtcaaacctcaggcattctaatgaaagagacacctggccaacctcagacattctaacacaagagacacttggccaaccttaggcattctaaggggagagtctcctggccaatcccaggcacttgagagaaacagctggctgacctcaggcattctaatgggagtgagtcctagctgacctcaggcattctaagaagacatgctcctggccgaattcaggcattgaaatgggagagattcctggctgtcctccggtatgctaaggggagaaagacctggctgacctcaggcattctaaggggagaaacacccggctgacatcaggcattctaatgggagagacatctggctgaactcaaggattctaatgggagagacagctggccaatctctgacattcaaacaggaggatctcctgtccgacctcacacattctgagttgagagatacctgaccaacctcaggtcttctaaagaaagagacacctggccgacctcaagcattctaatgggagagacacctggccaacctcattcattctactggaagagatacctggccaacctcaggcattctaagaggagagatacctggccgacctgttcatactaagaggagagattcctggcttaccacaaccattctcacaggagagtcctggccgatctcaggcattctaatgggagaaactcctggttgaattcaggctttctaatggggagacatcaagccaacttcattctttgtaatggcagatacacctggccgatctcaaacattctagtgaaagagacacctggctgacctcaggcattgtaaggggaggggtccctggccgacatcaggtattctgagtggaaagacacctgccctatctcaggcattctaaggggagtctcctggtcgaccacaggcattctaaccatagagagtctttgtcgacctcaggcattctgagaggagagtctcctggccaatctgattcattctgatgggacagacacctgtctgaccacagatattctaaggggagaaacactggccaaacacaggcattctaatgagaaagacacctggccaacctcaggcattcaaagggagagtctcctggtggacctcattcattttgatgggagagacaccaggctgacctcatttatcttaatggtaggcacctgtccgaccatcgtcattctaatgggagagactcctggccgacctcaggcattctaacatgagacacctggccgacctcaggcattctaaagggagtgtctcctaggcgatcacagccattctatgggtagagacacctggtctacctcagggattctaatgagagaaacaactggccaacctcaggttttctaacagagactcttggccaacttcgggcattcaaaagattgagactactggccaacctcaggcattctaatgggggagaaatgtggcagacctcaggcattctaacgtgagagtcttctggatgacctcaggcattctaaggggagagacacctggccaacctcaggcattataatggaaaggactcctggcctaactcagggattctaatgggagagacagccagatgatctccatcattctaaggggaggaactcctggctgacatcaggcattctgaggggagagtctcctgtccaaattcaggcattctgagtggatagacacctgaccaacatcaggcatctaaggatagggacacctggctgaactcaagcattctaaggggagagacacctggttgacctcattcattctattgaaagagatacctggccaacctcaggtattataaggggagagacgcatggctgacctcatccatactaagaggaaaggctcctggcttacctcaagtattctttttttatttttttttccttttttcatatatatatatatatatatatatatatatatatatatttttttttattatactttaagttctagggtacatgtgcacaacctgcaggtttgttacatatatatacatgtgccatgttggtatgctgcacccattaactcgtcatttacattaggtatatctcctaatgctatccctcccccctcctcccaccccataacaggccccggtgtgtgatgttccccttactgtgtccaagtgttctcattgttcaattcccacctatgagtgagaacatgcggtgtttggttttttgtccttgcaatagtttgctgagaattatggtttccagcttcatccatgtccctacaaaggacatgaagtcatcattttttatggctacatagtattccatggtgtatatgtgccacattttcttaatctagtctatcattgttggacatttgggttggttccaagtctttgctattgtgaatagtgctgcaataaacatacgtgtgcatgtgtctttatagcagcatgatttatattcctttgggtatatactcagtaatgggatggctgggtcaaatggtatttctagttctagatccctgaggaatcgccacactgtcttccacaatggttaaactagtttacagtcccaccagcagtgtaaaagtgttcctatttctctaaatcctctccagcacctgttacttcctgactttttaatgattgtcattctaactggtgcgagatgatatctcattgtggttttgatttgcatttctctgatggccagtgatgatgagcattttttcatgtgtctgttggctgcataaatgtcttcatttgagaagtgtctgttcgtatcctttgcccactttttgatggggttgtttgtttttttcttgtaaacttgtttgagttctttgtagattctggatattagacctttgtcagatgggtagattgcaaaaattttctcccattctgtaggttgcctgttcactctgatggtagtttcttttgctgtgcagaagctctttagtttaattagatcccatttgtcaattttggcttttgttgcctttgcttttggtgttttagacatgaagtccttgcccatgcctatgtcgtgaatggtattgcctaggttttcttctagggtttttatggtttcagttccaaaatttaagtctttaatccatcttgaattaatttttgtataaagtgtaaggaagggatccagtttcagctttctacatatggctagccagttttcccagcaccatttgttaaatagagaattgtttccccatttcttgtttttgtcaggtttgtcaaagctcagatagttgtaggtgtgtggtattatttctgaggcctctgttctgttccattggtctatatctctgttttggtaccagtaccatgctgttttggttaccgtagccttgtagtatagtttgaagtcaggtagcgtgatgcctccagctttgttcttttggcttaggattgacttggtaatgcaggctcttttttggttccatatgagctttaaagtagtttttttccaattctgtgaagaaagtcattggtagcttgatggggatggcattgaatctataaattaccttgggcagtatggccattttcaaaatattgattcttcctatccgtgagtatggaatgttcttccatttgtttgtgtcctctttcattttattaagcagtggtttgtagttctccttgaaaaggtccttcatatcccttgtaagttggattcctaggtattttattctctttgaagcaattgtgaatgggagttcactcatgatttggctctccgtttgtctgttattggtgtgtaggaaagcttgtgatttttgcacattgattttgtatcctgagactttgctgaagttgcttatcagcttaaggagattttcggctgagacgatggggttttctagatatacaatcatgtcatctgcaaacagggacaatttgacttcctcttttcctaattgaatacactttatttctttctcctgcctgattgccctggccagaacttccaacactatgttcaataggagtggtgagagagggcatccctgtcttgtgccagttttcaaagggaatgcttccagtttttgcccattcagtatgatattggctgtgggtttgtcataaatagctcttattattttgagatacatcccatcaatacctactttattgagagtttttagcatgaagggctgttgaattttgctgaaggcctttcctgcatctattgagataatcatgtggttttcatctttggttctgttatatactggattacgtttattgatttgcgtatgttgaaccagccttgcatcccagggatgaagcccacttgaacatggtggataagctttgtgatgtgctgctggattctgtttgccagtgttttattgaggatttttgcatcgatgttcatcagggatattggtctaaaattctcttttttggttgtgtctctgccaggctttggtatcaggatgatgctggcctcacagcatgagttaaggatgattccctctttttctattgattggaatagtttcagaaggaatggtaccagctcctccttgtacctctggtagaattcggctgtgaatccgtctggtcctggactttttttgattgataagctattaattatttcttcaattttggagcctgttattggtctattcagagattcaacttcttcctggtttagccttgggagggtgtatgtgtcgaagaatttatccatttcttctcgattttctagtttatttgcatagaggtgtttatagtattctctgatggtagtttgtattcctgtggtatcagtggtgatatcccctttatcattttttattgcatctatttgattcttctctcttttcttctttattagtcttgctagcggtctatcaattttgttgatctttaaaaaaaaaacagctcctggattcattgattttttgaaggggtttttgtgtctctatctccttcagttctgctctgatcttagttatttctcgccttctgctagcttttgaatgtgtttgctcttgcttctctagttcttttaattgtgatgttagggtgtcaattttagatctttcctgctttctcttgtgggcatttagtgctataaattaccctctacacactgctttaaatgtgtcccagagattctggcatgttgtgtctttgttctcgttggtttcaaagaacatctttatttctgccttcatttcgttatgtacccagtagtcattcaggagcaggttgttcagtttccatgtagctgagcggttttgagtgagtttcttaatcctgatttctagtttgattgcactgtggtcagagagacagtttgttataatttctattattttacttttgctgcggagtgttttacttccaactatgtggtcaattttggaataggtgtttacctcaagcattctaagggaaaagtctggccaacatcacatgttctaaggggagagacatctggcagacttcaggaactctaataggagagacacatgggtgacctcaggcattctaatgggaaagacacctggtccacctcaggcattctaaggggtaggactccaggccaacctcaggcattctgagtggagagacacctggctgacctcaggcattctaacagaagagacagctggccaacctcattcgttctaatgggagatatacctagacaaccacaggcattctaaagggagagacacctggctggccttatttattcattgtaatgggagagaaacctcgctgacctcattcattgtaatgggagacacaattgactaactgcaggcatatttaacaggagagacatctggccgacctcaggcatcctaaggggagaggcacctgacctacctcaatcatcctaacagaattgacacctgtctggcctcaggcattctaataggagagaaacctggccgacctcaggaattctaaggggaaagacacatggccaacctcaggcattctaacaggtgagacacctggcccaccaaaggcattgtaattatagagacacttggctgacctcaggctttccaaggggagggacacctgtatggccggatggcctcattcattctaatggggtgacaactggcctactttaggcattctaaggagagtctctgggctgacctcaggcattctatggagagaaacacctggccatcctcaggcgctctaactgaagagactcctggccaacttcaggcattctaaggggagagacacctggttgacctcagtcattctgacaatttgttgtcaatatttgtaaaaattacttcccacatagaattttagagtgctggcttttcttcaaaaaacagagaagatctgggatactctatgccagtgtgaagtaacaagaataaatgaataaatttaaaaattagaaaaaatcatttggctgcagctaagtaacatccttttattttagtctggccatgcattttccaattctctaggactcccttactcagtagtgctttatggccaactttttaaaaataaatttacctgctagtatcctgtatgcataggatttatgacactgtaatgaaataaccaacagtgcatccatacaacagtgcaccagttattcattaaactaggtaaaacatgttattataaacataatctatttatttgcatgtctccgtgttgttttgttttgagatagagtctcgctctgtcgcccaggctggagtgcaatgacacaatctcagctcactgcaacctccgcctcccaggttcaagtgattctcctgcctcagcctccagagtagctgggattacagccatgtgcaaacatgacaggctaattttttgtatttcagtagagacccagtttcaccgtgttagccagaatggtcttgatctcctgacctcatgatccacctgcctcagcctcccaaagtgctgagattacaggcgtgagccaccacacctggccatgtgtttttgagaaaaggtcttgctctgtcacccaggctggagtgcagtggcacaaacatggctcactgcattttcaacctccctggctcaagcaatccttccacctcagcctcctgagtagctgagaataaaggcatgagatatcatgcctggattatgttatttatttatttattttgtagacatggggtctcactatgttccataggttgatcttaaactcctgggctcaggcaatcctcctgccttgacctctcaaagtgctgagattataggcatgacccaccatcccaggcctgtgttattgttgttattttatgttgcataaaaaatcacaaagtgagtggtttgaaaaattagaagtctattatctcacaggaggccaggaggccaggcacagattaactgagccatctgctgttacatttgggatgatggagaataaaagccatctttttaaaaaaatcttatctgcaagggaaacatccctaatcactagaatgtcatattattaacacaagatttgtttctattttaattagaaaactatagagtatgcttagaccagtagcaaatggctcttccttgctgtggtttgggggacattggcaggtggtgagtattattctattcaggcctcttgcctaacttggttttagaaggcatgaggttctttatggttctatgtctgtgggtaaggctgcagctgctgattatgctaattcttgcttccttgcaaatagccaactccttattttgtgcattgccagctatcaacagagacattttaggaataattttcatgttaaaggcaggctttgttgtagtgtcctactgtgaactgtcccagcattagacccatcagaggtttgtgaagagagctctgatgttagaacagtgagcacagtactctgccaatttgcccattacctcttctgtctcccctagcaggaactactgtctggctttctcaagaggaacatgaattgctgctctaatggactgttcatggatttgagatcttattttagttagggaggttgagactttcatggcttcataattgatgcttgagaaaacattctttctaattggaaattctaacaatctccataaagcctgttttgctgtccctaaggctttgaatgcattcttgtttggtaatcagaatgaaaacaaacttttcaaagcaaataattgtgtttttttgttgttgtttgtttgttttttgagacggagttttgctcttcttgcccaggctggagtccaatggtgcgatatatgctcactgcaacctctgcctcctgggttcaagtgattctcctacctcagccccctgagtagctgggattacaggtatgcaccactatacccagctaattttgtgttttttagtagagacggggtttctccatgttggttaggctggtcttgaactcctgacctcaggtgacctgcccaccttggcctcccaaagtgctgggattacaggcatgagccactgtgcccagccaataatggtgttcttgacctttattttgggttatattctatttatatgttataatctaaatttaattttatttgattttgtggaagaagtagagaaaattagtttgctttttaattgatattactttaaatgaaaaaggaaacaagttagtaaatctaagagcatttaattttcacttttttttcttaccattgtctctgcttagccatctttttagttattagatgaattaggatactttttgcatgagaaatactttgacactcatgtatatcaatgaaagtgtgcctctgcttttgattttggtttactacttaaattactcttgaattatgctgacaagatccatctcaagtttctcaaagcataatgtgaggagagaaaaaattctacatgcttggggtttccttgaaggaaaccacaaaatccctgatgcctcaatgaacatgcagacctcccaggctgcctaagcatagaatgttaattctgaacacctaatttcttccagatctttccctccccgcttacgtggggcagatatcaacatatagtaatttatttaaagaagtatctgctcactgctatctttgggtcaatgcttgtgctaagctctgagattacagggataggttaactagattcctccttaaatgaattaagacttagagcaaaaaaatacaaataagtaataattgcccttaactttcttttgggtgtggtgaaaggcagctgggaaagatctttagtatcagtgagggcataggtaagccttcattgcacacagcatgttgagcaagggtcccaaatgggaataaatgggtgaagaaaatttcaggaaagaaaacagatcatagtttagagaacctgaatattagactaacctggattcaaatcctgccagcactgcacattagctgtgtaaccaaacaaagatctttaccattcaacatttgctggatacaaggttaatatacaaaatgtaatcactttcctatatatcagcaatagatacctgaaatttgaaattaaaacaccataacatttatattagcatcccccaaaataaaatacttggctaaaaatctaacaaagtatgtacaagatttatataaggagagccataaaactatgatttaaaaaatcaaataattgaagaaattgatagatactacatgtttatggatagaaagattcaatattgtcaagacattggttatttctaatttgacatatagacttaacacaattaaaataaaaatcccaacaaattatttcatggaaatcaacaaactgatgctaaagtttacatgaaaaggcaaaagacccaggataaccaacattagaaaaaatgaaaagccagaggactgacactacccatgttcaagacttactataaaactacagtaaccaaaagagtatggtattcataaaagaagataaaaagagattaatgcaacaggttatagagcacaggtatagacccacataaatataatcaaggagcaaaggtaatacaatgaggaaaagatggtcttttcagtaaatagcactcaaacaacaggatatacatatgaaaagaatctacaaacaggctttacactgcttaaaattaactcaaaatggatcataagactaaatgtaaaatgcaaaactgtaaaacttctgggaaatagcataggaaaagagatctacactaccttgggcatggtgatggcttgttagatacaacaccataggcatgacccatgaaagaaacaattgataagctggccttcattataatttaaatcttctgttctgccaaaggtactgtcagtagaaggataacacaagctatagactgggagaaactatttgcaaaagatatatctgatacagtacttctatctaatatatttaaaaaattaaaactcaacaataggtaaaaaagcttaattaaaaaacacaggcaaaagacctgaacagatactttatcaaaaatatatgtagatgccaaataagtacaagaaaagatgccccatataatatgatattagaagatttcaaaataaaatatcaataagatatgattatacacaaattacaatggtccagattcagaacactgacaacaccaaatgctggtaagcacgtggagcaacaagaactctctttcattgctggtgacacaaaatggtgcaaccacttttgaagacagtttgacagtttcttacaaaaccacacatagtcttataaaattcagcagttgtgccccttagtacttacccaaatgtgttaaaaaccttatgcccacccaaaaacctatgcacagatatttatagaagcataattaccaaaacttgaatgatgaatgaacattatatctagacaattaaatcttattcagttatttaaaaaaagaactatcaagacatgaaaaaacatggaagaaacaaatacctgttgctaaatgaaagaagccaatctgaaaatgctacatactgtatgatttcaactatatgatattctggagaagacaaaactatagaaacagtgaaacaatcagtgatttccaggggttgagaggagggagggatgaataggtgaagcacaaacaatttttaagacagtacaaatattgtaatgtgtactatacatatactgtattatagtatcatactgcattatattctgtataataatataatagtggatacatgtcgttatacatttgtcattagaatgtacaacatgaagagtaaattctaatgcaaattatggactttgggtaatagtaaaatgtaaatattgattcattaattgtaacaagactgccatgctggagggaaaagctgtgcatctgtgagggaagggaggatgtgggacatatctgtactttccgttcaattttgctgtaaacttaaatggtcctaaaaaataaaatctatttgaaagggggaaaaagacatttgaaattttaaacacataatgaaaatgcccaaattgtggtgataaaattttctgtatcttgattttattaattttaatattctggttgtaatattgtactagaattttaaattactttgtcccagattttttaaaataacttccctgaccacattattgttggccacctcctccatagtatctttaatctctttatagcacttattaccataaaaaaagcattctacactgacttaattatatgcctattgtcttcttccccttcataatgtaggctccacctgaacacaaaaacagtatttgcacctagtagctgcttgatacctatgtagtcactaaacatttgagtgagcagatttagttacagttatgatgataatggtaataagaggctgaggcaggaggttcactggagcccaggagttcaaggttgccatgagctgtgatcacgctactgcacttcagcctggggtacagagcaaaaccctgtctcaaaaacaaaaatggtgataatgatgattatggtgctgctaatgataacggtggtgaggatggtggtggtgatgacgatgttgatggtgatgatgtggactatgatgatgatagtgatgatggtgatgatgatgattataatgttgatgatgatagtcatggtgataacgatttacagtaagtttagctgtggtgggtcacattgctgtccattctcaaagatcagtcatagagctggtgctttgccttctatatatctactgctcctctatgcaatgaggaccccaacttctgttggagctgtggcttagacttatcctgagctgtggaagttgaattatccattggaaacatttccttgcccccttgattggcaaggggtggtctgtggtctttacagagcatctctagtctaggatggactctgcttctcttcataatcttttaatttaacccacataaaactttaaggcaggctgggtgcactggctcatgcctgtaatcccagcactttgggaggccaaggagggtggatcacatgaggtcaggaattcaagaccagcctggtcaacctggtgaaatcctgtctctactaaaaatacaaaaatttagccaggcatagtggtgcgcacctgtaatcccagctacttgggaggctgaggcaggagaatcacttgaacctgggaggcagagtttgcagtgagccaagattgcaccattgcactccagcctgggtaataaagcgagactttgcctcaaaaaacaaacaaacaaacagaaaacctctaaagcaaagacccacgtataatcctcatttgaagtattgaactgagacttagagacgtcaaggaatatgctcatttgccaagatagaaattggcaataggtgggaaaaatatctcactccaaagtttagattaactttttgacactatgttatatgactatagaaccatcccctttataaataagatccatgatttgtctttctttcataagcttgtgaggaagttctctgcatcatcctaagcttgggaacacctattattccttggtgttttttttttttttttttttttaacctatatgctgtgccttttcaagtccaaactcagtgtagatcatggttcatagatttcagagtggacaaatacatctggatctggcattagtctctttcataatctactaattatttacaaaagattggtggtgaccagtattttattaagtatttttggaaaagtctcagttcataaatattctaagctaaaaatatatttagaaagccaaatctgaactgaatttttgatgcacgtaactcttcttttcaaaacttactcagccactctgaaaattttccctcccataaaggacatgttgttagcttctcagagcaccttgctttttgtattcaggaaagtctttttattttcaatttgttatttatgtccttcacaatttttctaattttctgttttcagtagataagaaacatactggtatttggattttctataagaggagaatcaataaatgaataaaagaaggaagatggtatcctatgaggatgataattaggagggactgtatgaaagaaaataaattgctatcacctgaaaaaacataccatatttctagtcttggttcaggcaaatttaatgatgggaacttaaataagtctcctgcttcccaaggctgcttcttaaccatacaagtataaattccatgttcctcagtgatgcatccctgcttgtgacatgtccacctgttcaaaccttatcattaaccacttcacctttcatttcctccttctgaacattttgacatcaggttactgaactgcaaggatcagacagggatactgaggaaaccattgccatggtttctagcaatccagactcactcatgaacttcttgggagaatgagccctactgtggattcccagtccagaatcaacaggaaataaattgagtcacattatctctgacttcccagtaaactgcagaatgtcaaaaacctagtagccttcattcaatatgtgaactaaattgaaagatataaacaggttgtttctaaaatcatttttgttccaatattttgtttaatttactgcatgaaagaccaaagactagtatactagtctgttctggcattgttataagaaaattcctgagactgggtaattcataaagaaaggcatttaaccagctcacaattctgcaggctgtgcaggaagcacagtgccaggatctgcttctggtgaaggactcaggaagcttccaatcatggcagaaggcaaaagtggagcaggcagctcacatggcaaaagtgagagcaagagagcaaggggagagatccctcatactcttaaacaatcagatcacacatgaactcagagtgagaactcatgcatcactaaggggattgtgctaagccatccatgagggatctgcccccatatgccaaatacctaccaccaggccacaatttaaacagtggggattacatttcaacatgagctttgaaggggacaaacatccaaaccatatcacttcgtattcttaatttaatacagaatatcagactttggttccagctcaactcactgcagtcaccattggaaaatttattttatgagtaattaaatcttcttattcttttaatataatttatcaccactaacctgagtagctctatttcctcttggagctgtgcataataccactaagaaggtgcaaagactttccagagcatgggaacttaaagttctactatgtccacagcatcctctggctcaagcatagaaatcctgttccaggatgcttctaactgaaaattgtcatgtctgcattggctggaggaagtttttggaaaagcactgggaaggggtagtctggatttatcaggataccttatgacagagacaaatatcagaagtttaatacattctttaataaatgtaggtaagcatgatatgggtttgtcagctgttccatctcttacagctgcatcttctgcagcatgtggcctctcaaagattactgaggcaagataaagagcctaaggaggaggcccacaagctcttaactactccagcctggaagtgacacacatcacttgcatttacagctcattggccagaattagtcacattaccccaacataactgcaaggaaagctgggaaatttaggggagaacatgagacatttggtcggtacaaactgctctgctacacacccctagatattttgggttttgtcaaaatacattgtaaaactcagttggaacagtcaacaacagaagaggaccattcttaattcctcttattagagatttcaccaattttctgtcttttagtttgttctgtttggccttcacattatcctattgtgtcagttattctgagcagagtaaagcaagaaaacacacgagaaagaatagttttagagaatgtaatggatcaatggtattcccccttctaatagcttatttttatgcctattacctggagttgttcttctaatgagccttaaatgactgctgcaaattgacactcagaattgatgccctgattgcttcctgaacatcctacaggaaagttaatctgcgggacttcctgaccccaccttgtcttctattttatttcaataattagtatttaattagtgcatctgggcttttctcacctgccttttggttctgctgctgtccaggaccagatataaggtaaactgtgacccagactgctcaagagttgagttcatgaagtgatgaaaactttacccatcttaattagccctcacagagaagcctgacttcaaatccttagtaacccccgggggtcttgcttctctcgatactcagcagcaaagtgaggtatgcatactgcaatgggtacttggagtgaccagtgtttgaatagttttattttgccacactctatatgtgggtgtgggttaaatgatactcaagaggcaacaaaagtttttcaggggaattgtgggtggccatcctggaacgagtatcttctagctttctctgtcctgttgtgtcctacactgccaccagttcaaactttgctggggttcagagaagaaacaagcaacttggacttctctccctgttcctgggagcaccatcgggctcccaaaatagcatacagaccacggagggtacagggggccttttggacagcttagagaacacatccaagcctatggctcaaaggcaggacctggtgaaggggaaggggatcagcctaaacaggatccagagtgtgaaaggatcaagaacctggcagggcaaggcaccagaatgtcctgaggcacctgtgtcctcacacaccagctctactggcttcacaggctccttcctagccaaacatcttccaaatcaagagatcagggtcaccttgcttgggggagtaaagcaaaaacaagagaaggcagaaagaatactgaccttggtattacaggaattattaagaaattattttaggtagataggataaggggtccttggtaaggtttttttgttaaaagcagctccagaaatgtttcttttctagtagaaaaacagctcaaagggccaggctggcaagctttgatatgcaaatggaagccattagaaactaggtccatctaatggtgattcctgccctcttctccttgtcaccacgtgtgccaagcatcatggccacccccagagatctccacgtatgcagaatatcatggtggcctgcatttgcatgttaagatgctggggccagttttttcatgggccatataaatgacatacctggtcaaaccaatcccctggttcatatgcaaatcagacacctcctcctccagcctccccatataaccaactttttttctgcttcactcagggtgtcctctctccgctcgggacagaagggacagaggtcccttccctctgtctctgtacaaggcagattcttccttctttttttgcctattaaagtctccactccttaaaaccactccacgtgtgtccgtgtcattttatctaaattggcacaagacaaaggaccttcgtgttcctccagtcatcggagctgtatcattttggtgctttggccaggaatctgaggtataacattcatcagagcggtgagtatgggagcaagctaaaaacaatttttttaagcgtaaattctttagcatgggccataaaagcaggatatagcgttcaatctagcatgcccccttcattaaaggggccttgcccaattacatagtttttcttgagatcctttttttttaagggaggcacacaggacacacacgtctaggacgtcaaagggaaataataggtgaggactagggctaactgggtaagtgtgaccaggcctcaaaagcctagttcctctggtgccatggcttgaagggttatgcccacagtcatgggcagcacatttaacagggtgctgggacccaggaatcaggaagggaaaatagttcggggaatgcccccactgttttcttcatcctaggtcacatatggaaagaaaggagactaaaagaatgcttttattctcacttctctttctagatgggtaacaaatcatcttcagcatggactctcctggagtgtatattttaaagcactgggactcctctgaccccgagactctgaagaaaagccacctcatattctgttgcacaaggcatggctttcttaccatcttgggaacagacaaacctggcctgctggggggaaacttaattttaatattatctaacaggtcttttctgctgacagaagggcaaatggactgacatcccctatgtgcactttctttgccctgcaagacaacccagacatttacaagttctgtacaattgacccagttcttttagcagccatggcaggaaagcccaggaaatagttccccagagtaaaggaaggttccagaagagcaatctaacacagctattgaatgtcccaacccttccagtctccctccaatcgtaccatcagctcctccagctccaccatctccagtatatcctactcttcctccttcacttttacctctgtaggaaatgtctgatgggaatggtgccatgagggttcaagttcccctctcattacagaaccttaaacaaataaagggagactcaggccaattttctgacaaccctaataggtacatagaaattttccaaaatttaactcaggtgtttgacctcacatggagggatattatgttgctgataagtcagaccctcactgcagctaaaaagcaggctgttctgtaggcagcaggaaaaaaaataagagttgagcaacatgcctcctatagctgaccaaggagaaaaagaagaagtagggaaggtgagaaagaggtggaaactccattcccattagaaacggaagctgttccagtaaataaccttaactggaaccccaataattcaggagataactgaaaaaggacacactttttaaggtgcatattagagggactatggaaaaccagggccaattctctcaattacactaagctgtccacaataggccaaagaccaaatgagaatcccacagactttatggaaaggctgagagaagcactaataaaacacacctcttttactcctaatttagtcaagggacagctcatcctgaaggacaagtttattacacaggcagctcacgatattagaaggaaactacagaagcaagttatagaaccagatagcaccctaaagaacctcctgagaatagccacttttttttttacaatagagatcaagaagaggcccaagaaaaaataaaggaaatacaagagaagaacagaacctctagcagcagggttgcaagcttgcaagtccaggattcccaagttacctccattagctgttactgatgtagcaagtcagggcattttaaaaaggaatgccctggaagcaagaccaagccacttcaaccctgtctagcctgtggcagagaccactagagatggatatgcccccgaagacagaggtcactgggttcagaaccagtttcacagatggtccagcaggactgacaggtcctgggactcaaacctctggttctggtgactcagactgccattacagcacaggagccctgggtaattctggaaattgaaggaaggaaagtaaatctccttctagatactgaagccagtctctctcttctcctctctaatccaggcctcccctcttcccatagcatgaccatagtggtgtctcaggaaaacatctaatccaatatttttttcaaccccttagctgcagatggggggacctactatttacacatgcctttttaatcatgcctgaaagacccactcctttattaggtagagatattctagctcacatgggggccagcatccttaatgccccaggacaaacttttttctcccccagtggaagctaacattaatccataagtgtgggtaagtcaaggaaaaataggctgacctataactgctaggctagtacagatctaccttaagtatcccacttctcttcctagccagagacagtatgccctaaggtcagaggttaggaaaaagctgaaagccataattaataacctaaagatgcagggcctcctcaaaccctgtaatagcccctgcaacaccccaatattaggagggcagaaacccaatggggaatggagactacttcaggaccttcacctcattaatgaagctgtagttccaatccatccagtggtacttaatccttgtatcctgttaactcaaatacctgagggaaataaatggtttacagtcctagatttaaaggatgcctttttctgcatagtattacatcctgactctcaatacctgtttgccttcaaagatccagccagtccgcccagttaacatggatgctgcctcagggacttcggggtagtcctcatctggacaggcactgtcaaaagacctctctgagttctctcatcctcaagttagggtcttgccataagttgatgatattctgctctgtgtcccaactgaggaagcttctcaggaaggcactgaagctcttttcaacttctcagctaacagaggacataaggtttcaaaacacaatgcccagctctgcaaaacctcagtgaagtacctagatttagtgttgtccaaggggaccagagcattaggagaagaaaggattaagcctatttcctcctttcccctcccgcaaaccctcaagaaactaagaggatttgggggcaatacagacttttgtagactatggatacctgggtatggtgaagtagcccatctgttgtataacctcatgaaagaaactcagggagctaacctctcttttaacctgagaacctgaaactcaaaaggcctgtgaccagctaaaccaagccttgctgaaggcaccagctctcagctttcctgtagggaaggccttcaatctgtatgtatcagaaaggaagggaatggtcctaggagttttaacacaggctcgaggaccagtccaacagccagtgggttacctaagtaggaacttgatttggtggctaaaggatggccagcctgcctctgagacattacttcagtggctctgatggtcccagaagcctccaaattaatcctgggaaatgatttaactgtttacactccacataacatggcaggactactgcattctagggggagcctttggttaatagatagctgaatccttaaatatcaagccctgctgttagaaggttccaacatccaattaaaaactagttctctcctaaatccagccaccttcctccccaaggaaactggggaacctgagcatgactgtgaacaagtcacagtacagacctatgcagccagggaatatctcagggaaactcccctagagaacgcagactggaccctcttcacagatgggagctcttttgtagaacaagggatcgtaaggcaggatatgcagtaatcactctaaatgacatcattgaaagtgcatctctccttccaggcacaagcgctcaattagctgagctaatagctcttacaagaacaattgaattaggcaaaggaaaggtagctaatatttacactgacttcaagtatgctttcttggttctccatgctcatgctgccatttggaaggaaaggcattttcttaccaccaatggatctcctataaaatgtcaccaggaaattaacaggttattaccctcagttttctttccatgagaaatagcagtgatgcattgtaggggacatcaaaagggaacagatgaggtagccgaaggaaatagattagctgatcaggcagctaaatcagcaacaaggaagcctcaagacatcaacatgcttcaaaaccctctaatctgggaaggctccataagagaaattaaacctcagtactcccctacagaaatagaattggccacttctctatggtatacatttcagctctcaggatggccacagtcagatggctacagtagccaatggatggctactccttccattgactggaggctggcaaactcaattgccagcctccagccagtggaaaatcatttaaatccttcaccaagctttttacttggaaaaagataaaacttatcaatatgcccaggaatcattttcaggagaggacttactaaaaacagtcaagcaaattgttaatgcttgtgaagtctgtcttaaaaataatcccctgaacaggtgactccttcttcctcaaacccaaagaataggaaattgtccagaggaacactggcagatagacttcacccacatgccaaagacaaaaggcattcaatacctgctgatatgagtagataccctcactaactagaagtattttcatgccatacagaaaaagcctctaaggtaataaaagtgttagttaattacataactccccactttgtctacttaagtagctttaaagtgacaatgggctgttgtttaaggcagctatcactcaaggggtctcaaaagcactagccatggaatatcatctccattgtgcttggagaccctaatcctcaggaaaggtagagaaaactaatgatattatgaagagacatttcagaaaattatcccaagaaactcatcttccttgggtcactcttcttcccatggccttactatgaataacaaataccccttcaaaattagttcttagccctattgagatgttgtacggatggctttttttcccaataattttctattagattgggaagactctgagctagttaagtatgtaacctctctggctcacttccaacaggaattagcacaattagtaaaagcccaaccccaggacattgaaccacctctatttaacccaggagatttggtactggtaaagtctctcccttctctctctctccctaaacccaagctgggaagggctttacactattgttctttcaacccctttggcaataaaagtcaaaggaatcaatgcctggatacatcacactcgagtcaaagcctggagagctgagggaacaacccctgacagcccagaggaatgtcctgaatatcaatgtgaagaaataggaggtcttaagctgaaaatcacaaaatataagtaactgagtgagatctactcatcttagtctcacccctacctcaccaaatactttttgttgtttctacctctcctttcagatttgttgccaaatattagaacttattttgatggaaattattgactatgccactcttgcaagaattgctatactcgtgctactatttgcattaggactatacactgtaccaccctctgggtggaatatcagacaggaatctcaattactgtacgattttgcttaattattatcctcatagcaggaataacagttcctaactggaagtaaacatgagcattttactatcactaagtgttaaaactttttactggacttagtaatacatcacaccctttagctcctacaatattcaccatagcccatttgtacaataagactaattgttgggtctgtcctaagtggctcactcagttcgatgacactaagaaaccttaaaatgacccagaacttgccatcttaggatttcatttgttggctttacctctaacctttaaagacttatcagtcataaatgggacatgatatgggaggactttcaactgggtaactaactcctctcagagaacattctgcccccagtgccaaagaacagtttccctaaaactcagcttcacaccctcaggttgggaaaagttggcctagtaacagcaaatgctttgaaagcagtggggaaagcccatatttgggctcaaatattgtaacatcacatttgtaattgttgatagttcaaagatttggggagaagactgcaacaaaggggatctaacaggatcagaagccctagtggggggctttcagaatctagcctctccttctggttggaagtcctatgatgggagtggcatgctctaaacaaccaccttgactacaatgtaaagaataacacatgggccttttcaaacatgcatgcttatagaattccagatccttgcacgacgtttgctaatagtagtggcttacagatctgtgggcaaactggagacatctggactgacagcccttgccacaaggatcatctgagatattggccagggtataaaatgtctaattttttgaaactccatttgttaggtggacccttctcacttggcatgtcaaattccaattggcatcataaatgactatcttaaatatggttatccttatcccaaggatgcccctattatgtgtaaggaaggggaatttctaagatatgagaaaagtctgccactgtctctcacaaaccacaacttggaaccatcccttcaagaaacagggctagatattccttgtggctcctagatacacttagttctcccaaggcattagaagggaacttgtattacagtagcagtagtttccaacttatttttaaattctactgagttggcagcatcatcatgggacatacctaacttaggctcttttctagaaactgcactatctcaaatacaccggacaaagagatctatcatttctaagccctcacatggagatttagctgaaagggcagactggggaagggcatgcacatgacaatcccaacttgaaaaaaaacatggatgggaaattctatagccagaggcctattctgatttacgggcatccctcttcttgaaagatcagtacttactgtctctattatgatgcaacaaggatggaaggtaactataagtgccatagaggcacaacaacaatctatagaccctttatcctcagtaacagcacaaaatagatgggccttagatgtcctcacagctgaagtaggaagtactggtgtgcacttttaaatgaaacatgctgcttctgaattaacacttctagtagaggaaaatctacaggtacgtaaagatcaaatcaaaagtattatcaggctaagagaatatgtaggcttcagtcccaggtggctacaatccctctttaataaattccagacttctttatggaattggttagctcctttattaagccccctcttgcttatatgtcttgtattaacatttgaacctgtacactcaatactataacttgaattgtttcctctgaaatcaaactccaaatggtgctgcaaaccgaaccatgcaggaacacgccattcttccaaggacacttatatcgaatccaggaggagccctaactgctgttccccaatcgacaccccttttcagcaggaagtagccagaaagagtcgttgcccaaatccccctaacagcagttatggtaacgtctcctcaggggcgaatattatatgagttattaagaaattgttttaggcagataagataagggatccttggtaagtttttttcttaaaagtaactcccaaaacatttcttttctagcagaaaaatggcttgaagggccaggccagcaggctttgatatgcaaatgccagccattacaaactgggtccatccaatatggggattcccatcctcttctccttgtcaccatgagtgccaagcctcaggccccccgccccgcctcagagatctccatgtctgcagaacatcatggcggtctacatttgcatattaaaaggctagggtgaaagggccagttttttcgcggtctacataaatgacatacctggtcaaaccaatcccctgggtcatatgaaaatcaggcaccgcctcctccagcctcctaatataacctactgttttccgctgcacttgtggtttcctctctccacttggagcccccctcactctgtctctgtacaagggagcttcttccttctgttttgcctattaaactctctgctccttaaaaccgctccatgtgtgtccgtgtcattttatataaattggtgcaggacaaaggaccctggtgttcctccagtcatcgaagccgtatcattggggtcaagaaaacctgggtttaaaactctgcttctgttgtgtgaccttagttaagtagctcatcctctctggactcagttaacttgtctatcaaatagatgagcctcaagttccagtctttcagaaacagtctgagtttcttttttatttatttttaatttttgtgggtacagagtaggtgtatatacttatggagtatatgagatatttttatacaagtagcaatgcatcaaaattacatcagggtaaatggggtatccattccctcaagcatttattctttgtgttacaaacaatccaattatatacttttagatatttttaacatacaattaatttatttttgaccctagtcaccctgttgtgctagcaaatactaggtttttttctatgtttttgtaccaattaaccctccccacatctcctcccactccactaccccttccagcctctggtaaccatctttctactctctaccttcatgagttcaatcgttttaattattagctcccacgaataattgagaacatgatgtttgtcttcaggaacaccaaccccacccctcagtccttgtcccaaacactcagctgtgatcttcctaaacgtgccacttttagcccaccaggagaggagggtgacaggctgggggaagtggaagggaaaggcaaaaggcagatggcagctggcaacttgatcctttttgattcctcttttgcctgagagaaaaagaatgtgcctggtaagaatttaggagggcagtggcttctcatgcaccaagccagggatgttctttagaactccttacacacaagccaaccctctccccatacagtccttagcctgccaaggagaagttgaaaaatcaagggacactttctctaccactcctacacacaaagcaaaccctgtctctagaggtgtgttgggacaagggtcatacctgcagggacccaggcttaaccctctcctgccaacaagctggacacacaccccatggaaggctctcctagtgaggcctttcctcatcagccccaagtactgctcagttcaggctcttctctcaagagggaatggttccaagttagggaaatcaaatggaatccatttgtcagcctggagaggcacgccagtggtccttgcctgctgctgtacatttagtctttccccatggttacaggacagtttctgagtccctgccattaagaatatgaccacagggactcatgtgactaatttggctgcagtctctgttctctgggtctcaggaagaccctacctggaaaggttttgatggcccttggcctggagtgcaggggatggaccaagcaatttgggggagtccctgttatttacagcttcattgtgtttatagcagacagagaactagcagtctacactacagatgagaacatttgaggtccagccaggggaagtgacttacccaagtgcacacaacatctttagtagcagattcaggactccaaccctagtctccaaatgctatcacggtgtttgctctgctctactgcactaatcttggaggctgtattagtccattttcacagtactataaagaactacccgagactgggtaattataaagaaccttaattgactcacagttctgcatggctggggaggactcaggaaacttacaatcatggcagaaggtgaaggggaagcaaggcacgtcttacatggcagtagaagagggaagtgccatactcttaaaccatcagatctcataagaattcactatcatgagagcagcatggggaaaactatcccctgatccaatcacctcccaccaggtccctcctttgacacatggggattacaactcgagatgagatttcggtgggggacacagagccaaaccatatcatagcccaaccatgacaacaccttctctgaagtgtggcctcctccaggagggaccatggatttctgtagatgtaggtggactctgggtgaaggtgccggggccaaagatcctcatgtctctccctccactctctctctccttccccagagccctgccctagtcttacgtaagatcagcagttgctgacagatgctgctcagcctcagcagggactgggtgagggcaagggctggagagggctttaagcaggcctttgggatggagcctggtgagccagccctgtgtcaggaagaatgtgtggcaggggatgggcagagtggggagatggtggtggggggtgttggctattttggcaggtgcaggaacaaagccacagaaatatgtgccccatgccatagatgcccatgtggccctccaggtgctcagataagctatctgaaaccagagcagatacacagggaacacggatggaaagtaaaccagctgtccctcttgagaatcctgataaagcagaggccacccaggcctgggattgcaggctgggagcagagtttgggggtagaaggcaacctccaagatgttccttaatctctgtgccaggatcttggaagtcagagggtaaaagcacacctacagctgtacttgagctgatgctgtggatacacactcctaaatctatgtggggacagttttgcctactaggaaaggtcaccccatgaccagactactggctccttttaatgggctgagcagtgttggcaggctgctggctctgcagggctcagtgagaacatctgcaacatggatcttctccatgaaccccaaggccatgtggcaagccctcctcccagggaatggacttaaagtgctacaagaggtcagatacaaagcagagttttcattcaaaaacctaaaacaggaaactgtttgaggggggtagtgaggaccgataaagatcatttcccagtggttttaaaatcaagggatgtaagaccacaatctgctaaagctaccagattataaatccatagttcaggacccaggaggtctattggcttgcacatggatgcctatgcatgtgcatgtttgtgttcgttgatggcacattgtaggttcagtacataatgaaaatgagagaggaggaaagcaagtctggtggcagctgagctgactcttccacttgatctgtctctgaatcctcacagcccaggtcctgcctggctctgaaggagaaatggtcctctggaccaggccttcccctcccccatgagccccccgaaacctgcagatcttgcctacttgcgatccacactcttctgtttgtggacaaagaatgaagtcttgccattatctgctcccttctccagtcactcaaccacatgtcctgccttccagtcctcaaattcttctctcaatcctgctgccttgggaactactatgttgcatctacagctcctgtccttgaaagaatcctctgcacatgggacttccatttgctccacaccattccggaccccatcccctccacggtccccggtggcctctgagtcctgtggccttgattccccagccaggcttatcttcctccatgtgggcctccacactactagcagatccacagcagggccagctgaagccacatgcctgccagccagcatcctgagaaggaggagatatcaggaaagcaagaggcttgacagagagagacaaatgggttgggggataaagtggagagtgagaaagaagccaggctgctcagagaaaagtcagggaacctttaatctctgtttcccattctagcccaccagggtccagacttgctttgtgtcctggcctggaataatctagaatttaggaattgcttttcttaaaccctcccttaacttaagggtggcttactgttccttgtaagctgaacagcccttcaaacagactacagcttatttgtctggatgcctggaagagggatctgggcaactagagccctacaaagcccaatggacaaaccccagtagatcctgggtatcatggactgcatgtgtgaggctcctactgaccgttccaaggcaggaactctgttcaggaagctatgagacagtcacttatctagtgaggaaatccagccaccatccagcagccactgctcaacaccaaatagttactcccagcccattgtggatatccctgtccttgcaaagtgatgtaacaaaagtcaccttccagcacaacaattgataggaagagaaatccaagctgtagcagcaggagaaagtatgtgctgaaacagtgcttgcaaatttcaggggccacaagaggacaggccacttatggggtcacagggccactgtgacagtagagcaggtgggcaggtcaaagattggtgagtgggagccctgttctgtctccagagggtgctcaatgtcatcctcctccaagaggcctccccacccacctgcctacccagtggctactactcatttaactgccaaatgaagtcatcttgaacacatgctggtctctttagtagctgtgtccccagcaggaatgagggcagggacctcatgtgttggatgcacacatacaaatgagagggagctgtggagcggtgcccctgacatttccccagcagcctgccctcaatgggcaccccagggagagtgtgcaggcatgaagggccccacccctggagctgaagctgcaggaagaggcccctcggtgtcctctcaggctcttactccagaggagtccggctccactacctgggaaggcttttaggagcctctcctaagcctgtgtggggagaattttgcttactaaaaaagtttacgtgtgagagggactttccaaagtttagaaaatgagcatgtgaaggtcatctgcttgaggctcagaggggaaaaatgtatcagggtcacactggaggttccggcagagccagagctgttgaaatcacccaaagctctgggcaggactgaacccattcctctgccctgtcctcgatttgtcctccaactctcagctgtggaattggaatattcaccaagctccggccctggcagtgagtgaggtttgcttggggcagggccctcaggtcctggtacccctagctcagtgcaggcacaggagactcactggctggaagcgggccagcccaggggcaccgggaatcctgcacagatggggctctgagggcctctgttccctggaccccagatctgagacaggagccctcatccagaatcatggagccagggcagggctcctgccctacatgcttgtggggagtgggcacggctctgcacctggtctcaccctctctggttatggatagcaccaggatagtcaatcaacagagttctaatgattgaaagaaaagcattaaactacagcctgaaggggctgagaggcaccaggctgattttcttagggtggttggtcctagagtctctgaaggctcatcattctacaagctcacacagtccatgtgaggagaagaggagggacaagcagctgggagcagatcaggacctcagtgatgaggatatcacaggcacatggaggtatgtgctggaagctgatgagacagatgaccctggagttcttgaaggacactgcacctgaccctagaagtgagctggaagggatggacatctccagataagggcgctgagcccccatagtgctgatgtgcaccagcacagattccagtatctgctgtgcctgcagtgggacaaggtgtcagggcacacctgctcccagaggctgggctgggaagaagttggctgagtctcgccaatatccctgagccctagaggctctggccagacaggtccataggcagacagggagcagaggcaatgagacacacgggtgcttctgcaagagtcatggctctggcatgagggagacctcttgagatgcagactcgaaggtctgtcttggcaggatttgtcacacctgtggggcaaagagctagaacaaggaaaggctgggagaggaaggggtcaccggacaggaaggcaactaatagagtttggctttgtccctacccaaaatctcatcttaaattataattcccaaaatccccacgtgacaagggagagaccaggtggaggtaagtgaatcatgggtgcattttcccctgtacagttttcatgatagtgagtgagttctaatgagacctgattattttataagtgtttgggcaagttccttctttggtcattctcctttctgccaccttgtgaagaaggtggcttgcttcccctttgccttccgccatgattttaggtttcctgaggccttccaagccatgtggaactgtgaattaattaaaactctttcctttacaaattacccagcctcgggtattttcttatagcaatgtgataaagtactaataaagcacattcctttgcatgaatgatacgcccacagtgggtcagagtcctgcaatctgttggctgaaagggcaggggctctgcaaagctgcagggaagcaaagccagctgagggttctcctatgttcctgtggttggttcagaccagcctatgtgagcaggtgtggggcattctgggtggttggactgtgcaactgcaggcatattagtgtgtgcacaaaggggagtatgtgagagtctcccaccatgcacctgtggtcctctgccccagagctaggcccctccctgcccctcagtgtccagtgaggggtcagatttcttttcccactgagtcctgttgtggttgctgactcttttcatgcctcctgattgagagaatcaaggtggagatcagggactaaggcaggacagtgaggggctcaagatcccccaggcccagccccctgctcagggtattccccctcttcctgaaagggaagcgaccaatacctaccccttccctctgctatagtctgacccacaggcctgtccattgcccccttacctcccccgtatctacccctgaaatgactcattgctctaggggcttttcctcctctgccctgggcccagagtaagagacatcagggaaggaaagggtacctgggagtcttgatctccagactcctggaccttctgatccacacattgagccttgacatcaccacccctaagaccctcaagatctcctaaaaagagagccttccatcctagggtttagggccacttgcagcagcaaggcattttcagaggccctggattgaggatagactctgcctcactcccattacatccagaacatgctatagacacatgaaaaagctccctcactgtccctaggaagccatgtgctcagctaaggagatgggctcaggaacatgatggtaactcaaggttctgccaacattacttgacatatgaaaatacagagttttctagcactgccatggccaagattttggttttggagacctccgagctaatcagcctaaagatcccttgcaggccctgagccccccaccttctggctgtaggccgatctgccagttccttctccaagaggtggtgtttgctgactatacccacacaaacaatgaagcgctcagtgtgacaggagctcagagacttaatggattctgatctctgggaaccaagaacacaaactgctccctgacccatagaggtgaggtgcacagaccatgcccagcacatcaggtatcctctacacttctggaggggccccactcacctgcatagctgtgtgtatcctgccagtgtctctcccaacttcactgtgctggccgggagcctcatgctggcactgcagaatggaagacaggacagacaagccatgtgagacatccccacctcaggaagaccaggtctgtccctagggctggaggagtagtccccagcaccaaagagaacatggtcctccatcacagagtggactatgttgacttggccaaagtgaagaacttccagactccaggaatttttctccattcctgagaaacatcccactcagtaggacatccccaggatcagaacatcttccactccttccttctccccttctcttccaacaactatcactttcacctcaaagacacctcctgagtcagatccttcctttccatcttccccaccaaagcaatcaacatctatctgctccccggcctgccacccagagctcttcaccaggctgcttatacctcaaataaatctgatctggtccttcccgctcagacccctcagactgcagaacaggggccaaactccttggcatatcacacaaggctctcattatctggtccctccccctgcctacacctcatgcctatgtgccagccgacagaacacccatgctcttcactgtgcccttccacattctgttccttctattggaaatgccattcctccagttttccacctgaaaacatcccactagttcttcaagttccatgttgaatgtcaattgcttcataataccttccccagctctcacaggctgagtggttgcagctactcctgagctcctagccctgggtttgaaattcctgtccctgcacctccctgctcgagtggtctgtgtgtgtttcatggtctcatgtgagttgcttgagggcagcaactctgccattcatcattgtactcatcctcttccatccccaccccaacccccaggcctagcccagcagtcagcttcagtgaatgtttagagggcagatgaatacagcacaagtggattaaattcctaacacatacgtgcaactccttttcagatctgatatttttttcccaaagcatgatcctcagactcctgcatcaatgttatggagcatggggacccttatcaatcccacagatccacaggcaccaggcctgctgaggtagaggctttccctccctacgctgttcctggtctccctcctgaaaagcctcctcctccttcccacctcaagactaaaccctcctccttctttggtgccccatccaagccctgcatcctccaagcagctctccctgatcctacttccctgttccatctaatccagctacagtctctcctgttaatcccatcccttgccagatctggagccctgggcaaggaatgcatgttccttttgtgtatcatagggtacagcctggcacaaaggacatgggtggcagatactcagaaaacaatctgaatatgaccaacaggaaagagctggggcctccagtccccctcgccccaacctgcagattaaagtggtttctcagttgtctttcctggggctcatctgaagggggcaggaaaagcggtggcttgtgagagtcctggggaggtcggtggccccctcaagtcaggacgcttcctcctccttggatatcctacagcttccaccaagcgtcaactgtgaccaaagaagtctgtggacaagccttcattaaagacccttgtcttgtctggtaaacgtatctgtgaaaccccatacaccagtcagggtcacaagcccttctctaggtttccttcttgggaagctgttaactacctgttttcctatctgcctatctgcctgccagccctgtggggcaccgatcaacatcgggccttcagcctcctccctagggcctggcacacattagagacgcaatgcccagtgaatgagtgagtgaccctgtgaaccaaataatgaagaataaacactaggacaaggcaatatgagatttccccacaccgcatactttgtactgttggagcagtggcctagcagagagcattaggagagccctgctgctctccacctctcccctctgctcctgtgcaagcctcctaagtgatgccagaaactgatgaaggcaggtgtgggcctcctgaagcccagtgccatcctggcctgtactgtcatctgcagctccgaccttgcccactacgtggggctgctaatgcttactggcacccagctcctgggtcactaacctactctcctttatttagcacagccttgtctgcttggggccacccatgggaacccaaagcctactctatccagagcatggtcctatctagtccgaggctcctatgctgtgatgggtgctggattcctcagtttaccttgcaatggattcaagacaagggtgtgctgtgctcttacctgaaaggaggtggtcctggcctggagtatttgagggagctactgcaggcgcatcgagtggatgagggggtctgcctcttcctccttgctggggttttttacccagacagggcagggggagcatcacacagaggtctagagcccagtgggctcaggcagccacagaccccatgtttcatcccaggagctgcaggagaaggggaaagtgagacagtcctctgcctctctctcctgcctccttcaccttctgtaagagtggttggtggataagcattcccttggggccaggtcaccaggcagagcttcctaggggagcttccggaatgatctgaggcttcccaagagtctgttggagccctggagtccaggcctggatgaggatgtggtagggggtaccaggtctccctgccccatggctggtgccccttgaagtctagcagcctgccccatctcagtccctgctctgaccatggctggaaggaggcagtggggaagagactgccaacaccaacctgccttagtggggtgggtgagagacagacagggagccagagaccacctgagtggaaataggaaggagccctccagggtggagggtggaagggtaggagggagaggacactgccaaccaggagtgtgactagtgagaggcaggagactacagtcagagggcccaaaatgccctgctctgcagaggacggcagtttcttccaagggagggccctttctgtctgcctctcagtggtggcttggcctcctccgagaggccggctgctcctgggcctgggctgctctgaggctgcagtcttctttggagccagcttgatgtcttgtcaggctcttctttaggactggtgacctctcgaagatcgatgctttctcagacaccagtctcctttctgagcctggtgtgttttctgagacacttgtcttttctagaaccgacctctctgagatggacttttgctttatcaccactatcttctcctacactgatgcctttcctggggccagtgtcttctctgagacacctgtctttactggaaccagcttcttctctgagctgtcttttctctgataccactgtcttctcagatagagatgttttctccaaggctagcaccttcttggcgatggaggttttttctgagaccagtctctcatccagtgctgtcttccctagcatggagtatttctctgagaagactggggacttctctgttttttttcctccctcatggctccctgctcaccaagctctcctcctccagggcccagggaccccgctgctcctggctttgtctctggtgaggtggggtctccagttccttcttggggactaggagatgctgcacgtcctgctagggtcccagcttcccctttgctcctctgccttctgcctctcccagatgggtgcccatgcagccttcaccacctgctacctctgccccttctgacagattatgatagcttggatgtcctcctcctcatctttggaggctggggcagcagcttggaaacctctacttcttccatgcttgagagtctgagtagggaggtggagttggaaatataatcacaggatatcagaaatggaagggaccttgggggcacctaaccaatggagatgccttcaggaccaccatggggaatacaagaatgtcaggccctgccctcctccccaccaccacttaaataaggattatctttacctactctacatattaggcttccaaggggtcattgaacaaagcaagccatgcttttttaaaaagttaataaacccctagtaaggtccaactattccatgtttagacatagtcaaaaaaaattaagcaactatattatatgtgccagaccctgtgctaggcattgagggtcaaaagaaataagcacagcttctgttccttagaacttagatcaaaactagaagtattcagggatttgtcaaaggtctcacagctaattgacaggagagcttggagtgaaagcgagggcttctgatgcaccattccactttcctgtcagtcacatgggtacagttgagaccaagtgatagccacaggtattgctgcggcctagggcacatgccctgttctccatcctctggggcacccagggaaacaacagcatgagaagactgtcaaaaacccacagcactcggcctccagagaaaggagattcttttccttcctcaactacctcttctccatgtgatttcaggcaggttaactcactttcaaagcctcggttttcaaatctgcaaacaaggcttgcaaggaagtaaaaggagactcatctcatgagagtgcccagcacagtcctggcatgtgagtggcattcagtaaattctgggcccttctcttcctttcctcataatctcaaagtctagatggcaaaaccagttctaatgttcctcccctcagaagtgaattatgggggtcaggattagagggaggcaggctggctaacaggaagaggtgagccccagagctggacagatctggatacaaactctggtcctgctgctctgtaggcatatgattccctcagtatccttcagcccagtttccctttctgtaaaatgggttcacaatacctccctctcaggaatattgtgagaactaagtgagctatggccataaaatgtcccacacagttttggctcatggatgatctcaatactggcaatcattgttgtgaagagggtggaacctagcaggtctgaggggtctggagaaggtgaggaatttgaaatttatcttcacaaccttcagcttcattctctgggcttcagtgcttggccggctgaacacgctgcacgaaatctggagaagctaattcatccccaccacccaggataccacaatggtaccctggcccctgccttgacctgagcacttctcagaggcccgacgttctccatctggctgatcctgggagcctcgtcctctgtggtttagctctggctgcagtggcaccatctgagcttctgctcctccttatcttccaaagaccactactaggaaaggctcagggaggggaggagagggtcagcacagcacggagaaacataagaccctccccattgcatattcctgtggggctgaaagaagagaccacataccctcctgcctgcattgaacacaagaggctgtcaagtgcttgaaatgcagctggtctgaacagagacatactgtgtgaaatacacactggattttaaaaaccagttaaaactctcattaggaattgtgtatactaattacatggtgaaatggtaatatttttgatatattggggtaaatgagctatcgtattaacataattttactttttacttttttaatgtgaccactcaaaattttaacattttaaatgtagttcccattatatgtctattaaatttctactaaagctgtagggatttgatttaaaccagggtttctccacctcggcaccactgacactttgaccagataattccgtgtgtgagtctgtcctggattgtaggatgtttagcagcaaacttagccaatacctgctgggtgccagtagtagcatcccccagctgtgacaatgaaaatgctttctgacattgctgaatgtcgctggggggcaaaatcacctcagatgagaatccctgggctggacattactctggacttcagggtgggaatgtgaggcctccctgcctgagggtgactaggaatgtggaagggtgggcatggttatgcctgaaggaagtagatgagcttgccaagtgcctctctctttttagtcctgggattcttagataatactccttgacagacagtcagggtgagatttcctcagagttactcagttccccatggaatttcttagctttggggatggggagacttgcaaataaaaccaattacacctgaaaaccccgatatcatctcctctttgcttcccaggggctcttggggtctctgtcaccttctagttgaaaagagctgagtcagagagcttgacagatggtgatgaaaatccagaaaactttcacttgtctggggagcaaagggagcccacacaccatacttttggctcctgccccaatgacccttcattcacgtggccatccaggtactctcgcagccagccagtcaagccccaccaatttatccatctaccactcactcacacatctgtgtacccagccacccacccatttccatcatccttgtcccaccttccctaccacacactcacccactgccccccagcccatcctcccttccaaccaccacatctcttccaatccaacaaaggagcaaatgcatacttactgagcaactgtgacaagccagcaccatttcagcaactgcggtggagtggggaggggggtcagagaacatagcagggtatctgccctggagacactaacaacctagtaagaaacagaagaacgtccaccaagaaacagaagaatgttcaccaataactcccccaaccaaagtgcacaagtcactctgcagagtgagaacacaaatgctacaagccaagattatccggagaggctcaaggaagagactgaacctaggctggatctcagtgagcaaccaggcttcggatgtggtgactggcagtccaggcaaaggagaagtactgagcaccccaggaggccagaagtttcggggtttgctggggacaaaaaggctgtaattcccaagggaggcaggagagggcttgagcaggggagtagcagactgagagagtcagtcaggtgagcccctcctggcacctccctctgtctcccccatgcttagacctgggttggaaaaagcctccgtcttcccttccagagttacagcaatgactataaggcctgcccttgccactcctgggcaccaaactctcccttctttttgctctccagcctcccttgctgcccacctctagttcctactgagcctcttccctcctggatggtataaaacagtgccacatggagtcttaggtaagacagagtcaggtgatctggtttctagtcctcctgcacttgggtaagtcatttccttttctctttttccattttccctcctaaaatgagaaggttcaaccacaagacagctctcatttttttctaggtccagcatcacatgtattgagccaatattcactaaacgaatacttctgagcatctactatgtgccaggcatgcttccagggactaaaaccaagatcctccccttcatggagcacagatccagagtggaggagagtcagaccatgagtgaggaaaacaagctcatgaacaaaatgagataagtgtcactgggacaacagaacaaagtaagcaatgtgggagagggtggctgggtgatgaaaccctctgagagatcaggttcatgaggaggaggcagagctagatctggcagccagagtcccaggaggagggcacagcgagtgcagagcctggatgtgaggaggtaggtatctaagggaagagggtacgcgtgggccaaggagtagccttaagggaagttggacaaggtgccagggttagagcatggggtcttggagaccaaggaaggaacttgggttttaatcaaagtgtgctggacagccctggagagttgtacacagagaagtgacagggtgggatttctgtagtttaaatctctctggctgatgtgtggaaaaagaatggaaagggcaggggaaaggggaaacaggagacctgttgggaggcacctgcaattgcacaggtaagaactatcatgacttgaactgacagagagatatgggaaagggatggattcggggcacattctgaagatagagccaccaggtttactactatattggatgttggacttgggggaggcgcgtggttggtgaggaaagaataattaagaacaagatttttggcctgagctattcctggagctaccatgagcaggacaggaagaccaggggagcaaggagtgtgggggatgttgggtggtagaggggagggacaggagggaaatgaagacctgtgtttctggtagtgaaaagcaaaggagatcaagatgctgcagtcaggaagctggaaaaataccaagccagggcgttggcatgggcaaaggagcgagggcctcagtcaaatgctgctgtgagggagaatgagaccaggtggagtaatgagtacaggggtgccaggcttcctggaagcggcagcttcagtgattgtgccagagcctgacccagctggtgaggatgaatgggaacgaagaaagaaattagtgattagcagcactcttttgagaaatattactgagaagaaaagcaaatagaaggggacagtaagtacccagaagaggatgtgaggtcacaggatgctttttttaagttgaggtataatttatataaatgtacagatcttaagttttgcttttcttagaaaaaatgagcaaatgcaggagagtagagagggcctgaaaagaaagggtgattaagttgtcctgcagtgagggaaacaactgcaggatagggcctctttcttctctagtacccagcatggcacctggcacccaacaagtgcagaccaatgtagaagagcaaggcaatgtcaatttcaggagtgcagggctctcctcctccctaggaactattcaacctctgccttgatactgaagagcacaaagcaggagaaaactctatgtctttcccaaaggcaatctgtctgtctctctttccgggaaggtgtgtgcctgccaatcactctataggaaaggatgtacctttgaagaggaactttctggaccctcttaattctgccatcagtgcagctcttccaggttagaacctcagtccctctgtcagtcttacctccacttcctcatgcagaagggccccagtcaaatgtttctccccatggccttcatcatggaatttaagcgaggttcccctgggcctccacatgactcctgtgagctctgtagaatgatcattcatcgttcattcactgcataccaactgatggtctcttatgaggtaggattcaacgtcgcacctctccttggttttcttgttcaaagttagaaatgccaacttctgctgtctttcatctgataccacatctccagcccccacacccctgcttctctggatgcacccctgccccttgcccatagtctaggaacagctcttgccctccaaagctgagggattcatatactggggaaagtgacccacacagctcaaagcacctcttccctgagctggctgggctggagcctccaggacccctgaatcctgagcaatccagtttccacatactgccctcagcccttggggaagtggtctatttgtttaccctccagtgaagccttttatggtgtctgatcagagcctggtctccttggaattgactcattccccaggctggttctggtcctgagaggtctccagggggctgggctatagaagatggggcccaggcatctttgaatgtccctgagctttacaccaagagcccacagctcactcaaggtgatgtggctaccactcctgctgcttgggaatcatgtggccaccttcaacccctgacattggcaaaacctgagtcccttgagaatcaccatccaaccctgggaagaaaagctatctccaataagcaaaagttatgaggaaattgatagaaatggaaggcaaaggtcagtccccaggagggaccacagcaggtgcaggtgttgagacccctatgagaataaattaataattaggggcttagaacagtgcctggcatttgttgaatgtggagaataataatcagtaactaaaggaataaaggaggaagaaaggacactcacatgtgtgcttactccaatgagaggcactgctgtaatgtcactgacattcctctttacaacagccctgggaggtaagtgtgtgttatccccattttgattataactttcccaagattacgcagctagtaaaaataggaaaccaggccagatgcagtggcttacgtctgtaatcccagtacttcggaaggccagggcaggtggatcacctgaggtcaggggtgtgagaccagcctggccaacatggtgaaactccatctctactaaaaatacaaaaattagccaggcatagtggtaagtgcctgtaatgccagctactctggaggctgaagcaggagaattactggaacccaggaggcagaggttgcagtgagccaagatggcaccactgcactccagcctgggcgacagaacgagagtctgtctcaaaaaaaaaaaaaaaaaaaaaggaaaccaagattttaatctagattagcatctcaagtgcccatacccttaaccactttactactgccagaaaaggctgctgaggaagcctggccctaaaccagagtgaggttccacctccttgggagctcaacagctgagcattcaggagaaggaacagaggggcctctgaggtgtgggctttcccaccccggggcaggctgcagctcagggcacagcctgggagggcagagttttggggaaacccagtggccagtacaacattgaccgtcaaggccagagccaggcctggggtgaaacctaaaggccccaacaactgggggtcccagccactctccctagctgagggcacagccccaggtggctgcccaccactgcttccctccgaacaatgctttccccctgtgctggccttcaccaggggacacatttccctccttatgcctgcatgtcatactgctatcctccctattccagacttcaccaactccaaaatggggctccactttttctcttaaatatttctaaaagacatctgccccgttactcattggagagcttgttttgacctctccttttggaattttcttcctaaagtttaacttccatctattatgtagcaactgatagcaagggtttaagtgcagtggttagtaaaggtcatgtttacaagtaaaacccattttcccaaactgaattataggtagatgcttcttatacaacagatcaaggctcggatgctctggttaaagtagggagagggtgtgaaggctgccccagaagcattttctagaaccctggggctcaaggagcataatttgcaattcttaggggctaggatagagaaagggagaacagaggagaaagctgcagtgggggctggccatgatcttggacctaccttcattccctaagcggggtaggccttaggttccccttcaacataaagggtcactgtgggtggtcactgaggtcatttccagccctgatggttttgggcaaagtgttgggagtccccagggcagtgcatggaggtgggaaggcagctcaagcccctgggaaatgattaaccactggctactcagtcccaggtgctctcagatccacctctcacctcctgcagacaggccagtccagggagaaaagatcaaggcctctgaccagggcacccagccagcccactcaccactgcccctatcccaggactggaacactcaatttactacttaatgccaagaatatgctgcaggctggccctcagctgcccaccaacctccccatctaaggcctccctgactaaggccatgcttgtcacactctcagcacattcctcccaaccctggcaggctcagttgacagtgaccttctctcctgcctccccactgaggcttgttgttcacttagggagtgaagcagaagtgctcctctgttccaggtgcctcatcagggtgactgttggcagcagctgctcctgcccatggggctatatgagagctaaggctgggcagaggtgacagaccaggggcccctgtggctgaattggtttcccagggcttccctggcacttaccctggacatcctgtgggaacttggccccacccatgcacccacatgagtccatgttcatcagagcaatggacaagctaaggccagactttgctcccatttccagtgctagctgcctccccacaccacacacccctgtacatatgcaggtgtgcttacagacataaaatgatatatatcccaccagactgtgaacttctgagaaagtagtgtctggtttccttctcaccagagactgtttctgagaaagaagggtccttggcctactgcaggcccagaaacctccttcccactggactgcatgagggcccattctccatttctgatcaagggcttggattctcatgtagaagtttattatcattcaaattctaattctatcttgcagatagaattagaagccaggggatgaccttggaaaatacagtctatttcgtccaattgttcttgcctgtctactccatgtaataatgaagaatttgctcctttaggctctagcgctgacaaggggctattgtccatgggagtgagattagtctgctagaacacaaaagccacacacataaagggctgctttcagccccaagaagaggcacccaggccagtgccaaagcgagagagggaggggcagggaggctcctgaccagattctgctcatgggggaattttggccagagctgagcaatacatctctaccaggtcacaccacaaaacacggcctgtgtcaagacaatacacctatctgtgcttcagttttcttatataaaattgggtggtgatgatacctactcttgctcatctggtggaattataatcagtaacaaacaagtaatataatgtatgtgaaacctcattcattcattgatttttttttttttctttgaaacatggtcttgctctgtggcccaggctggagttcagcagtgtggtcaccactcactgcagcctcaacttcctgagctcaatcaattctcccacttcagcctcccaagtagttgagaccacaggttagccatgcctggctaacttttactttgtttttttgtagagatggggttttgccatattgcccaggctggtctcaaactcctgggctcaagcaatctgcctgccctggcctcccaaattctgggattacaggcctgagccattgcacttagcctattcattgattttcttttttaaaatttttcatttgtttttattatattttaccattcattaatttttaataaacatttacaatatctgatattcataggcatcagacatgtgacaaacatcattctaggtgaggcagctaatgtaatgaacaagatccagtctgaatgtccaaggaacaaagcaaaatttgcactaaccataaaaaacagcaatgacggcggtgaggatggtggtggtgatgatggtaatgatagatgttcaccccagaaggctctgatgcctggtgactgatttttgtgtgtggtgattgttcctcctcttgttcatcttggctatgaactaagagagattaaaatgcttttgtacaaaggaaaaagtatgcatattctatgaaatacatttctctgcctgtttaaatgtagcattttcaagagaggcagggatattcagtgttcaccacttgggtgaatggatgggttttcagcatcaggcctgggaggccctgaccagtcatgtcgttgatctcaggcctgtgggggtaagtgtgtgcaggagggttaggatgtggcatgtggccagggagctttctttcctccctgggcctcagtgtgtccacttgcaaagttaaaatgtctactttcccattgcttaagctttctcaagctaatttaccacaaatcaatctgctgagattcaccaagatgataatggtttaccagagaacaaagagaaatgttatatatatatatcttagatatagattatatatgttatatatctgtacacatacatggtttttttttttttgtattttttttttctgtagcagcagtcttactatgctgactgggctggtctcaaacttctggcctcaagcaatcctccttcccgagttcccccaaattctggggttacatgaatgagccactgtgcctggctacgcttcatgcttttgaatactttttgattgaaataagacagaaatacccatgagctagtattacacagcaggcttctaatggataaagacaacaaacaccccctactactgagtgttctgctgtggcttttaatagtatttacaggataactaagtgaaacatgaagaaaaacagaaaaagaagcggtgcttgtataaagttcttgtatagaaagagaataaggagaaaaaactatcaaaaatacggaatatatagcagacctgttttctgaagatagtacctgtatttctatagtggtgggaggatggagtgcagaagagaggtggtaggagaatgagatttgctacagtacacatccatattgagggtatcatggcaagttcctgttccctatgccacagtggtacagttgacaaattcttcaatagaatgcactctcaaacatcaactttataaattatctgaaaatataaaattataaaagaaaaaaaatcccaaagcatttatttcaaagacaggctaaataaaatttgctaatgacttacttcaaatcttgcatagcaatgagtaactttctttccttagatattcatcctctttaagctaggatttagattaccataactatattttatgattaactgaatagcttcattagcaatttcttcatcaggtaatttcatggttattttccaaatgaaatctattcccatcaacttcagcttttctacattctgttcaaaagaaaaaaacaaattatatagcacaccaggatcacaaaattacagatcattatttcctgttacatcttgagtccacaacacttcagttcaacatgaatcaaggcttcaggacctcagctatatgaaaacactgtcatactgatatggaacttgaaaacaaaaacccaccaaccacagaagcaccagcaacctctgtgggagctagagtaagtatggagagttttcttcatatgtccctaaacccaaagcagacatacacatcgacaggctattgaagcagacacacaggaggaataagctgggcccaatcttcataacttttcttcaaatggaaatggactcaggctagaagtggctactaattcttggggttcaagctagtttctccagagctctgttagaaataccaggatgggccaggcgtgttggggctcatgcctttgatcccagtactttgggaggctgaggctaggagttcaagacaagcctaagcaacagagcgacacccatctctacaaaaataaataaataaaaacaaataacaggatacaggctttacaagagcttgtaaaaatttttaccacccaaagaagccagatacttaataaaagggacttgaaagccagctctcactttggtccaaggtggccagaaaatggggggcccccggggaaagggccgcagacacctgtgggccggctccgtgggtgtccttgaacttggatggtggtcccgcagctctgggcgccacgcagactgctgtgcccactggggctgggctcaccaggaagtaggatcagcagaaacgcgggcgctcacaactggtgccaggttcggtttccttaggcctctacccgcagggccccgtccctaccgtgcctggtgggtgcttcctcacctgctgctctccccacaacggggctgctcttttgcccaggggctctggggcggtcccggccacccagagcgcgaggtcgcaggtcccagtactcatgccggaggccctgacgtgctgggggtgcccacgcgggcctgtggtccccacgccggcttgtggtccccacgcctggctcgggcacctgcagagggagggcgccctcttgagtcggcgccctctgccgcgctgttgccgcccccgcggctggaggtcagctcctctccccggccatctaggcctcagctctgccctgccccctggccgctccgctatcctaccccctggccaccaccagaggaagaccccttctttccctagctgtgcccgcacagtgaggccctacccgcgggccgcctcctcccgctgctgccccagcgctgtcctacccccggtcgcgtcgccgaggcagccgccacaggtcggtgctaccttctgggcaccgaaggagggaactctcctttccccagccattccgccccactgtcctgccctacccaatggccgcctacctctgactgccctacccctggtctgcctgcctccactaccgcccgccggctgcctgctgccccagccccctccaccgtggcagccgctgccaccgcccaggtagtgcaacatcccgcagcggtctccttagcgcccgcaagttccggcctccaaggaggacgctggcgggtggcctcggcgccggcttctcctctggcagagcacaaaacagccctgggcaaaaaccacaggcaactcaaacgctggaccaggccctcagcaggcttttataccagctttatgcaaataaagtctcctggaacacgtgttctgattgaatgagagcaagtctataggacaactctgattggataatttagtccaatgagattaggtcaaaagcttccttctcatcaatcagaacatgtgtcctaggagcctgcacttgcagaaggtgggtatatagctgttgaggtgggtcagtcttctcgtttgactctcttctggttctgtgtgctgtgctgtcctgttctggcaaaaggaggacgagctggcctacctgctgggcggctttattggagactggagtctgcggatggctgcagtgagatggcagccgctaggagggggacctatggcaacaggaggttggttggtgggcggatggcacgggaggtagcatcgctctgctggtggtggcctagcttcagcgtcagcggtaccggtgcgaccaggttaccaggggatgagggatgtgactttggagttggaggctggggggatagaacactgctggggaataaaacactgctggggggatacaacactgctggggccgggggaggagggtggcacagtgttgcagcaggtagcggggccagggaaaatagggttcatatttccggttgtgacccagccaggcgtgggggacagcatgcccatgcagatagcctgggaacgtcaggattcctgccgtgggttcccaggtttgcatccttgcagtttgtgtggccaggactgcctaggagccactgggcagggagcagccccattatgggagagcagcaggcaaggaagaacctagggggcacaggagggttgggccctgtaggtagctgcatcaggaaccaggaactcgcacctgcatgaaaaggggccaccaggtgtgaatggcactgagggactggttcccagtttctgctgctcctaattccaccacatcgtagctccagtggtcgtagtttgcgtgatgccccgaggctcaggacctccacccaagtgcggaaccaccgccgggagccagggactgtgctgtccgcagccctcacccccggggccccagtttctgcaaagagaggctgcactttggagggtgggtgggtgtgagtccgtcagctgaaacctggccccttatcccaagtggccagcataacacggtgacacaacttagtgtcaccactctcctcaccctactcttgagtcagatggtctgaggggcctggtggagtgtgttcaaccgcaggaaggggcagatgtgagatggtggtggggcaacagacccaagtcggtagtcaaggtctggggggatgtggagggtcttctagcagaagtggaagggccatggggctatggggtcaggagaggggtgggtaagccaggcccactctacacaagcaccatagtcctccagccaagctggccccagcacgccgggtgccatcctacccctatgtgtgttgttaggcaccaggcggcctggcacagagcaggagcctgcctcctggggaaatccagctcccatccacagcctggcagctgcacgcacagaggccattgcccagggagcaagtgggtttgggggagggtggtcggcccagccagaaagagaaagagctgggagtagagccacctctggctgggctttaagttggggtctttccagacctccagggctccaggctgccagctgcctgctgaggttctgggtttcctccttagccttcagtttcctcacctgaccagggggacctatatggcagtgtttagattattagacttgttactttgggaaaccctcagcctactggctctctaaatttttttttcctgactttaaggatcttttcaatggattatctagagatggggaggcaggaaggctgggatactttctcttggcttaacagtcccttcagggcattccactccttttaggatcttttaaagcacgtgcctagcaactcatcctgtacctgagagagctgggaagaacttcatgcatgtccagtactagaatgatgtgttccctgaccctgggccctcatctcaccccaaaacctaaatccctcggagcaaccagcttcagacacaagtctgaatttgttgcctgttgtctgagattgacccaaggtcttctcctcatatgagatggggatcccaggccccctgtatttaggatccaaccaccagccacccttgtgggcccacctgggcctcttcactccacttgtgtaggaaagccaaatgtccagacctggtgtcctatttgtatctctctttttctcagtgtatgtttgctataatggcaatgatacagcatttccatataagtttcgggatatggaatgttccccaccccagaaagtccctacatcagcaagccctgattccaccccctttgggctggctgtgcatgtgctcagcttgatgaaaacaaaaatggcctatgcagtctacactgctgagtgtgatctgtggacatagcttcctgatcctgcatctccttccccctcattactgaggtctattctgtctctcacttttcacctgaactgctcctgaagccaagatgaggaatggggagggtcttctcctggggtaaatctttgctctgaaaagcctgggcttgccccactctgttatcccctcctttgagctccatttctgccagaggttggcaagatgcagcctatccctgtttggtcttgtgcctcctataagccaagaaatagctttttattttcgaatggtagaattcatcaaaagaataataatacttaaggacattttgaaattttccatgtccagaagaaaacttttgtggaggtgcagtcatgcctgttcttttacagggtgtctgcagaaggctgctgtcctgctacagtggcagagttgagtctttgggacagacaccagtgggaaaacctgaaaatactgacccaaggccctttagggactgtttttagttcttgatttgagagttacatagtgggactggaggctttgcaccaaatcttttatcactcccactgctgtagtctctgctggtgtgtctgtaaagttagggtaccatggcacctcccttgagagtattgagctccagtgtgctagttttgggggtgcctgcttcatggttgcttatcccacctacagaggtcctgggcctaaaccaggccagcaggatgagttggtcattggaggctggagcctgcaggtggcagaggcactatggaagctggtgttgctgtagtctgtggctctgggggtggtggctcctgctccctggacacccaggatgtatctttctgaatttggaaaccttccttaaactgccagcctcaggacccagcctgataatccccaacaatcacatgtaagtgtgcatttgatacatgtagtgtatttgcagagttatggaactataggcacagtataattgaagtgcatttcattcatccccaaaaggtgatgctgtttgtggccagtccctattaccttctagcactagaccactatacatctcccctctgtctccagagatttgccttttctggacatgccttgccagtggaatcacagaatggggtcatttgctgctgctttctttctgtcagcttaatgtgtttgagttccattccttttgtaatgtgtattattactttattttgattgacaaaaaatataataaagatataccacccatgtttttcctttcattccttgagatgtattcaggtagttttcatcatgaatagtgctgcagtgaatcttgttgtgcacgtagactttcatagcttataggcgcataactgggagtggaattgctgggtcaaaacaatagttccttcttaaacattttgagaaattgcctcattgtgttttaactggctgcactattttacactcccaccagcaatgtgaggttttcctatttttctcattcatgacaacactttttgttgttgttggattacaaggtgtaaagtggtatctctctgaggttttgattataatttccctaatggactaatattgaatatatttatacatactatttaaaatttgtatatattttggcaacggtaaaaatttctattaaaatctcatttttaaaattgtatttttgtctctttatagtttgtattcttaagtttaaagttacagttttaaaaaaattacagtttaaaaaagtcttaaaaaacattttagtttaaagttacagttttaaaaaaagttacagtttaaaaaaaaatgtccttccctatgtgttttttggggggttgtattttgaatagtattgtttctttaattatattttgagaatattggtagtgcacagaaatgcaattgatatttctatcttgatctcgatcgtctgcaatattgctaaacttattactttgagtgagtttttactaaatttctcaggattattgttattattattattattattattgagacagtatatcagtctgttgcccaggctggagtacagtagcacgaacacggttgactgctcccacctcagcctccagagtagcgggttctacaggcatattgccaccctgcccaactaatttttgtttattttttgtaggaatgagagttcactatgttgcccaggctggtctcaaactcttggattcaagtgattcccccactttagcctcccaaagttcaggggttacaggcatgaaccactgtgcctggctaggacttcatacatatgagattatgttttggatatgaaaaggcaattttacactttcctttggaatctggagtccttttcttcatttgttctttcatgtttttttttttatgatactttaagttccgggatacatgtgcagaacatgcaggtttgttacataggtatacacgtgccatggtggtttgctgcacccatcaacccgtcatctacattaggtatttctcctaatgctatccctcccctatccccccaactccccaacaggccctggtgtgtgatgttcccctccttgtgattttttttaacaatgtcatcaaggacaatgttgaatagaagtggcaaaagcgaatatttgtgcatcttgttcccggtcttatgtggaaaacattctttccactaagtatgacgttttctgtaggttttctatagataacctttatcaggttgtggaaattctcttcaattattgatttggttaaaattttcgttatatgctaggtatagtgaattttttttctgtgtcaatccgataaccatctcttggtcttccatcacttttacaatatggtatattacattaattgttttagccgctttattgagatacaattgatgtacagaaaactgaatgtttattatattcaatatgttaggtgtggacaaacacttgtgatatagaaccacaatcaagataataaatatatctatgttaattgtaatgaccacagggcccacacatccagggacttgagaaatcatttagaagaatggatatgaatggaaacatcaagtttttttagttgccacataaactgcatatctgtgccacaattcctcttggtgtaagggtccttaattctttttaaatgttgttgggtttgttttgctagtattgagaacttattttgtcaaattcaacaggggtagtgttctgcagtttttttcttttctcctgtggtttttgtattatagtaattctggcctagcataattaattgggaagtttttccttctcctttttttcatatttgtaaaggattggttgtaattgttcatcaaaaattggcaaaatacacatcactgatgcaattgagattgggcatattcttggcatgaagatttttattatttttattttagattcagggaaaacatatgcttgtttgttacaagggtatgtggcacgatgctgaggtttgggctttgactgaatgcatcacatatgcagtgaacatcatacccaataggtactttttcaacccttgtctccttcctctccccaccttttggagtctccattgtcttttgattcccatcattaattccatgaggacccaatgtttagctcccacgtataagtgagcacatgtggtatttgtttttctttttctctgttaatttgcttgggggaaaaggccaaattgtggcaatttgcatgcatctagctctgctatacataattaacaccagagccctcaatattttttcttttgcaaagatggggattggatcaaatatatccaatggatgtttttaagcagtttaaatacagagcctgttagatcacttgctcattttgctaaaatatatttggggagagagaaggagcctttgaggattttaggctatggatggccccacattctcatctaaattgtcatgggaccattggctaaaattaaagcattttacccaagaaaattcttactctcctcccaagagaatatttgatttgcatctgctacagaattttcttttatccttgattatcatttcgggttttctgggtcctttagggctgttttaagctttgtgtggactgatagacaagatgtaatttaactcttagagaatcaacctatagcaaatttcagaggacaattcatgtgatcccttgattccattcctacccagtgcctgcccctgtgtgggaaagatttccaaagattcatcaaggaataatatataactttcttttgaattattttgcctgggttttttgagcttgaatcttcaaaaagaaattatttatataatgtatattatttagatactttgtagctgcaatttggcatgcaaaactatttttaagaggtataattttctaagtatattaaatagaaaatattcatttctagatacagcatttgtgcatgttaaaagctgtttactgaagaaaataaaattcataattctgtttatatggggtacctagaatgggcaaattcatagaggtaaaaacagaatagaatttactggaggtaaaagcaagagttgtttagtgagtacagaatttctgttggggaagacaaaaaagtttggggtttaggtagtggtgataggtacatagcattgtaattgcatttaatgccactggattgtacacttacaaatggttaagatgataaatatggcatgtatatatacaatgaaaacctgtaacttctaagaagatatatatatacacacatatattatacatacatacatgtatacatatacatgtgtacatgcatccataggcttcagattaaatttgcctcttctccctaatttattatagaatgccaagttaggtagggaaggaaaagtagattaatttggtcctgggaatttttttgtttttgaattttatttggcttaccactgagagtagaaactcaatttgaatgtgtgtgccactcttctttataattcagaaaatatttcactattttgtttatttgctataagggcaaggactctatgatttttttcattatggtacaaggatatttttaggactgaatagttatcagatgcagaggaaggtaatcttgaagctcaattcccaaattaaagtgttttgtatacaatttcttacatttttgcagtgttgaccttagggaattttctaagctcacctatttgatttcactgaaccataatataatgtgcagtttcttttcttgtaggccaagaagtggccacgtgaacagttgggatttgtttccataaaattcctctctagtcaaacaaacaggtcatagaataaactaaaaataaatttgtggaagtcagcattcatttatgactaacaaagaagagaaaaattccatgagaaatagcaagtgcagagctgcttccttaataaaaatctaccaatctatttcaaatttaaacccagccattaattaaaagggacacataaaatacattggcattaaaataacctcagaaaaaggaaacctgttatcacccctctctttgaacatcattcttgaagtgctagcccatgcagacaggggagaactgaataactgtgtatataagaaagaaaatgaaaaacttgtcatttttggatgatataattgtccactatggaagcccagaagagtcaacagcaacttagtactagtaagaggttggttacaattggaaattcatttataaaagtcaggtagataggcatgtcttctacctgcgggtctgggaatatatcagtgagggaggtggaacacaggttctagctgggtcttgggaaagtgaggaggaagcacgtggacaaggcagggctccagaggcaccagagggctcatggcttctctttgttctcgccaccactttcactggggcccaggagctgagttccaagacttggggaatagtggacttctggggcaaagtggctgatgcaccaaaacatcttttaaagaacagataaagaacagaagcgtacctgggagagctggctgaaaccaggacacggtgggaccattggaaaggactctaaaccacagcagcagaaggagagctagacttgcagggacccaggctccacactagggacctcgaccttgtcctgcagggagtggagacccatgaatggatgttaggtgggtttggtttgcacatagccttggtgtatgttgatagtgttgtaactgatgactaaccaggcctcacatttgcagcccacagtgccttgcatacaggagatcatcattcttctggtcctatgccatgtgattgttactgaggaggatggagatgacatcatctaccacgcctcctccccaggtgagggctgtggtgagatgcatcctgccagaccctcctcaggagacaagggtattggcagttattcgtgaatgatgcaatggtgccacctctgccacagactcagctgtctgcccctgccctcataccatgaccaggctgtgactacaggtgttagagctgtagagaactgggactgtgctctcccgactctcctaacgctgacaacagagggaggacccaggctgtcttgcatttcccagcagtggctattgggctaagtaagtctctgaagagagagcagggcaagcttctgtcatcccctagcccccaggagttttccaactgctgtggaagctgtgtatgaagcactctccccactttgtgtggctctggcagtcccacagcacacgactaaacatggccttgctcagaggtgacatttggtcagaaagttgtgggaatactacttaggttaattagagagaacttgcccgtgaaagtagcaggaatgtaaatcactttcctggtgaattagctctaggtccatgtgctcccatttaacagaagcgcttatttcaggaccatggtggtaggaagagtgagtgctgctataccctgagtccttactactgtgcagataatgccaggcctctttaactagagtgagttttgctaatttgaaaaatgacagtaaacagaattttaccattatgagtgattgtcaatgtttcaccaactctttattgacagatgaagctgctttggtggaaggtgctaaaaagctgggctttgtacagtgagaacaccatattcggtcatcatagaagcagtaagtggcaaacttgtgcacattttagaacagctactttcttgaagattgtgtattggacatagcatgtctattgcaagaatgatagctaaatgtttatttttctatctgtgaaaaaacagaactgttgaaaagttgttaatgtaattatattattagtgttatttgcattacaatacttgtttgctctttaagatgcttccccacacatctttttacattggtgtgaaaatattagtagcaaaaaacttcaaaagtctagttttcattctacaatagttggaaaattaattttttgttgcacataagggcatattctatgcctcttgtagcctcagcacctaagatttcttacacagtgaagcctcacagtcctctgggcttctgtctggctggctgagagagaaggggtcaaagcttaatatccctaatctatataggagggttcttcttcactaaagtaaagggaggtcatgtattttctgattttttttttttatttttgctccctatggttcagaggaagaaatttagtgatagaaaaaaggttatatcaagaataagatcaaatagggacccttgagatgggcaacagggtaaaatgatgatgaggacaagcagggcaggggagtttgtcatgatgaccagttagaagggctatagtgcattcgaagttcacttccaaggggtatattagcgtgatattgtttctgactgtttagtactgtagtcagtttttgcctttgcttctatgcaaaacctgtgaaatatcagaccttgtacaaattgcttatttcttagcatctgcagtttcctttcttatggagtacaaagatcagattatgtttatttttattgtaaccaacagagggaatttagcttagggaagtgtgcaaaaatagaacaaagtactgattgagtatagtatttcctttacagaagctttttaaaaatgaggcctttccctcttgcgtttgaggaggcttctaaccttaactggagaactttcaatcgcatgggtgcttgggtgctgcaacatttatctgcattgcaaaaatggaggttgggggtagtgggcagggactagtcaatcagaagtgggagagacagacaagaacagctgcttctgtctcactcacatgccaaagaaagacgagcatctacagagcctgttgataccatcctcttagtgttagatgccagactggtaccactttgttatttcattgaagttttttggtcatatttctgggagtaaaaaagaataccctattcattaggacttgcaaataatcataataaatataatcctattaaaccattaatactggggtgacgtggaaccacagattgtcaaattagataccaggtatttaccaggtattatgatgaccttgctggtcatcataagagctgagtccatgggtgcacgtggaggtggttgatgtaaccatcgtaccgagagatgtggctcctgggaatggaagccctgctgctagacagtggatattataacattcctcagcctgaggagaaagggaactggtggatccagagagagctgaataaagatgggtgaaggctggatgaagtagattattagttgtattttaggatgtagtgaggagtaaagcgttgtggagatgattattcagtcatgtacttggtcattcagatacattacttcactgattatttctctcaccccaagaggtgagtgctatcactattcatcagtaagtcaaacacttagtggaagaaactgaatttaaattcacatctactgggcttcaaaggctacattctttctactgtgatgtgttatggaaataccagattagattaaaaagtttgaaagcaggccaagtatggtggctcacacctgtaatgccagaaattgggaggcaggaggatcacttgaacccaggagttcaagaccagcctgggcaatgcagagagaccccatctctcaaaaaacaattttgacatagctgggtgtagtggtgcacacgtgtagtgccagctacctgagaggatcgcttgagcccaggtggttgatgctgctatgagatgtgattgcaccactgcactccagcctgggcaacagagtgagaccctgtctaaaaacaaaaacaaaaacctttagaaacagcatacacagcatctgggattttgtagatggaaagaaattgtgattcttgacttctaacttgaaagaacccaaagaagaagagcatttgattaattgccctaaaaccaggtgcagagttaccatctcttatctgcaccaagatccaaaagcctttgaattccaaaagttttgtcctaagtttggggaatagtcatttggcagcaaaatctaatcagaactgacatgaggctattataatctttatgaatctcactgcatgtgactttcatacaattttctgcaggaagtggatatgttatagcaagcagtgttaccccagaccgtgcagggggcattatgataaatggtctagaatgcgcatataactatataaaattggaaaatcctgaattcagaggcataactagccccaagatttctgatggacccatgcagctttgtgttctttatcttcatttcttggaggtagttacaccagccaattgttaagacagccatgtcactgaagaaaaatgagaagcttttatcagaagagcaagctatgaccccagaagacttgtcagaaaatagtacatgttgcaggaggctagagggtgggaaggggagagaaagcagaagagatgggggcagagagagatagaaagagagtgggtttatgagtgggagaaaattgctttgagattttaatacttacacttttaataggtaagagcctatttattttttcctttagatggtacaggaacagacactaggaatccttatagtcctggaattttctaggcctgtatctcttttatacacttaaaatatgttttaagtgtatgaaggagtttatgaaagtttaagtgtatgaaagtttttaaatatatctttttaaaagctttatctcagttcatttgtatgattgtatggcatgactcaatatagtacttaagtattaaatacagtaaacatctctccaaatcttcttctccttggaatttgagacttttattaaagaaaatgaagtaagttattttctttgttttagtcaacagaagtaaagtttcatgtgctccttttctttacacttctacagtttgatgttcttgcatcagcagctgcagagcagtctgaatagtttatacatgtgatgagagcattattttcattggcatttcccacgtcctatgaggtctttctcctagctccatctgagcgtgcctctggagatctgagaaagtgacaaatgatgacagatgagataaattcatctcattagaggcttggtccatgtaggacagttctactgcgcatgtgtgtaagcatttttccccagagcagttttgaaaattaagactcataaacatttgttaaattatcttattcccctaggatatttatactttgttataagaaaacgcatcttaatttttttttgtttttgcctctttaacactgaatggtcaatgctaaaaccaggttctgttgctatctgaattgcatcttttcctgttactaaagttaggggagtttttctgtaacgtttgttaaatgattcatgaattgcttgctctgtctgctttataagctattggataaatgtcggcactgcattcgcttgtaggaaataccttccagatctagtctttaggtttgcaagtgtgaactttggtgagacaacaacccttggggttacatatttaacgagagagattggggatggttgatgactgtgatagctcgtggagtgggtggtgatggtgctctgggtatggaggtgagggacgtgttaggcagccctccagacttttttatgcccatctcttgttggagactgtccattactttctagttgcattaactaggaccagcagttaatggacaagcaagaagggagttagataaaaatgggtgaatatggattaagatgtgaagatgaattttattattattattattattattattatttgagatggagttttgctctttttgcccaagctagagtgcaatggcacgatctccattcactgcaacctccacctcctaggttcaagcaattctcttgcctcagcctcccgagtagctgggattacaggcgcgtgccaacacgcccagctaattttttgtagaaacagggtctcaccatgttaccaggctggtctcgaattcctgacctcaggtgatctgcctgcctcagcctcccaaagtgctgggattacaagcataagccacctcacccagccgattaattttaaattatatgggagaataagaaagaacaggtcatttgtggttatagttgtggtcctatctctttttaattaatcttttacctgaagttacttaatcttttttttttttttttttttttttgagatggagactcactctgtcacccaggcttgagtgcagtgttgtcatctcggctcactacaacctcctcatcccaagttcaagtgattctcctgcctctgcctcatgagtagctgggattacaggctcctgccaccatgcccgcctactttttgtgtttttagtagacacggggtttcaccatgttggcgaggctggtcttgaacttctgacctcatgatccacctgctttggcctcccaaagcgctgggattacaggcatgaaccaccgtgcccagcctctcttaatcttgataacactcttttcaagcagttgctttacatattgagaaactaagacatgaatttgttttttttgttgttgttttttgttttttgatacggagcttcgctcttgttgcccagactagagtgcagtggcatgatcttggctcactgcaacctctgcctcttgggttcaagcaattctcttgcctcaggctcccaagtagctgggattacaggtatgcgccaccatgcccggctaattttgtgtttttagtagagatggggtttcaccatgttggtcaggttggtctcaaactcctggcctcaggtgatccacccacctcagcttcctaaagtactgggattatagacatgagccactatgcctggcctcacttaattttgataacactcttttcaagcagttgctttacatattgagaacctaagacatggatttgatatctttggtaagcgcacacaaccactaggtagttgagagagaatgcaggaatttatccagagctgaggagagactatcctcactcttaggcatttaaagttgattgggaaggaccaaactgaagatccacagagatgggtggtcagggctgctatagttgaggtgtgtctcagaatgataacatgttgacataggcatggattggaatgtacagaaaaggagaatggtgaggcttgtgtgtgcttgaagtctggaggttgcgcatggaaggatgagtgggagatgaaaggaggctgcacaagtgggtggatagcagtaagaagaatttatgggtgattgggactcacgaaagccttggtgggtgagggtggaccatgatgaaagatgtgtaaggaactatagatgctttggtgaggaaaggagagaggaagagtttattggtgctgaattgggaatgttctagaggtttgtaattttttttctacccagtttaaagatgaaacagtgaggaacttttgagtcaaatggatctatactgaatctcccagtttgctacctaaagatcaagttacttgataattcctagctaaaaaagtaaagaatacttttagagagtagatccagaagtcaatcacatacacagccagtgctagaattctctttttctttttttcctactgcaaatagctttgctagtatatttttgtggcaggggaataaataggtttatgtccattagatgtaaatgaaaagactaggagatacacagttacgttcaactttgaggaaaaaggtagggaaagatacagcttgactgtttttaggagtgtcaggccaccttttgtttttattggtgtttagctgtaggacacacattctatcaacagagcaatggtgacctttcattttttactctcccagtgacagaaaaaggatgtaattgttcaaagtctttcagtgcaactttaactccactgtaaaggggctgtaagtatcggtgcagtgtcctgcatagcagagagttcttggcaactactttgtcaatcagctccttttcctaactgtggttctcatcatttgcttattgtttgcccaaagttgaaaggttctttcaggtaggttgtcaagttgacttaggagtaaaagcccatggtggttcaaggcagaatggcacagatggtcagttttagccaatagttgtttcagaaacagcaactcaatgtgtcaggcaaaatccttggagtataaattctgattccagttttaccagcattgtgttgtgactttgggaagataaagaattttggttggcctgtgatgatcttctttaagtgctctgatatgtaaatatatgttctctagcagctattcttctcaattgttgtggttaattttttttttcatcaccaagagctatgttgtggggacaagggcagtgtccatctgtggctgcattattgctgctccttttggtcaggcttttcgtcctgtctgcttcctagtacccaaatctaaatgtattctctaagaaatctgtgaatcttatttttttttaattttatgtattccctaaggaatttgtgaatcttatttgttaaatcatgatcttatgtattgaggaaaataattattaagcttattttatttgactgtcaaaaatataaagctattctaggattactgattagttgaaaatcttagtaatcgttaccaattgtgggaagaacggtggtttcatatgagtacagtatgactagcggtttttaaaaatgaggaatacatgggaattctcagggcattatattttacccatgaaataattctatttttagtaatagctacttaaattaatttcatctaggttttgttctcacatgatctgtttcttaaactttttgtttatttaacattatattttatacatgaaataattatgttttgagtaatagctacttaaattaatttcgtctaggttttgttctcacgtgatctgtttcttaaactttttgttgatttgacatcaaattctaagtactacagaaagtacaaaaggcatcaatgtgaggcagtggagagaggaaggctgtaaatatagaacagtgtccatatgaaaacaccacagaggcatattctatttctatagaggtattttatttttacaggattttattttttccaaaattcaagctaggttcttctacttttttttattaaaaagcatcctaaaactatgtactttatagcatattggattatctgtggaatccagtaccctagccctgtctgtcatcatggaaatactcacagggcaatgagctgtgtacacccaaatgtttctgggcagaaatggattggctgcctactgggttgtgtcttacctgattaggagcttcttcagtatcagggagcaaagttgtacttgagcaatttaggatgtgcattttaccctttccacttctgcacaaaaatataaatgttgggatatgagttttacagagttgggtgcatgtaggcactgatgtttctctgatgactctcctggcaactttggctctccccagtgttgcttttgtttgacttttatgtacagaacagattttagtcttgtttggacacatctatacccaatttgttttccaaagctcatgcctgagcccaaccgaaggctgtattcctatttgaccactcagtattctcatggacactggaaaaacaataatacaaagccatgcgaagcatgctggctacaaggtttattgaaaggttttccagccacagtgtctctgtatttttataggatagtgtattttgtgagacacttttaaaagtgttaaaatacatggaggaaacattatgccatctggatattttgccacagaaggtaagtgaaatgtgaaaatgctatttttgaccattggagttgtactttctggcatgttggctggcttcacaggagcatattcttctactgcctgccccttttccctcccacctactcctcctgtgcccatggcagggactagatgtgtggccaaatccaaagtcaattacctgtatagccctccataactcatcaccagtagtgcagaaagaggaggcatcccatgcagaatcaactttagttactggtctctttcttagaaaactcaaacattgtcataactgtcataagaaaacagtgttttcttatccctctcttatgcttatgacattggttgatctatgacttgaacaaaaaattcatggaacccattgtgagcaggaaaggtgttatctgaaaggctttaaacaaccctgatgtcaggttttcctgccagtaatgatagctggagatatgctcagatgctggctgctttcttgccttagtgtgttccactgaatgcatgatgcatgcacttgtgaatacatgcagatacatgggtgtagctgcttgaaagactggatctttcatgggacagcacattaggctttttttttttttccaaacaaggtctcataatgtcatctaggctggagtacagtggtgtgattatggcttaccgtagcctcaaacctctgggctcaagcagttgtcccaccttaatctcccaagcagctaggatcacaggtacatgccaccaagactggttttttttaatatttattttgtagagaaggagtctccctatgttgcccaggctgctctcaaactcctgagctcaaggcacattgggcattatgttgctatgttgaaacatacttcctgcttcctcatattgatacctgcttactgtacatgtacacatggataatgcacaggtcctgtgtctctctgctgtggggaattaactcatgcaacttactgtgcactctccatcttgcggtagaagtggtttagttagaaaatgggagaactgtttttaaatatccctttggaactgtgtaaatgttgaattaaagtgtccttaaaaagcagtggtttctttaacttttgagcatgtgtgatgtcccctgtgaggtaaaacactctgcttgcttccattcaccagtggctgatttgcaggcttgtgcactctgtggcttacgctgttctctctgaggatgattatgaggagtggctgaaaggctatcaagaagccagcaacacattgaaaaatggagctcagtggttggaagagtgtggtcagatcattgagaagttaaccacacatgatagtctttacagatccaagaaggacttaagcagctaccgaacaaaatctttgaacaggcatccttctactatatagtgatgttttcttgttctgtttcttgttcttttcctattctcttgtcttgttctctgagacatttctttgtttgctttaagaagcacttaattttcatggctatctgaaatatctagccaccctcaactgagaatgacagcttaagaactctcaggccaaaaacagcatcagtgactttctggctttgcttaggattaggcttaatgagattagctcaccgctcaccgtgttgagttacatgaacaatcagaacgctgtgggctgattagacaatgtacacactaagcattctcacacttacttgtggtaataatatttaagttttgccattgctactctgtattgcctacttcattttgttgttgttgttgttatggtggctgtcttcactctatcccaaagcattaggtagctttctttttatgggagtccctcaagtctgagagctggatttcaactttttctgttttatgtcagcaaccattagaccatccattttccaatttctataactttgaagccatcacttgtttgcttttttcatttcttttttttattttttaattccttttagttttttatgctcagtttttatgtttcttattcaattgtttatattcagtcattttaatggaatttgggtaggaatagaactgaattcaagtgttcatttgccttgatttagtggaattatccaaaattacttttagaatctgaaaacagtgattatatatactgggtaatttacaaaaagaaagaggcttattggacttacagttccatgtggctgaggagacctcacaattgtggcagaaggtgaaaggcacatttcacatggcagcagacaagaaaagagagcttgtgcagggaaattccactttttaaaagcatcagataatgtgagacttattcgctatcatgagaacagcacaggaaagacctgcccccatgattcaattacctcccaccaactcactcccatgacatgtgagaattcaagatgagatttggatggggacacaatcaaaccatgtcaacattttacttgcaaattatatttgaaattatattaagttactatgttgctagtcattcacaaaacatttaaacaaattgcgatgccagaactcatatattgacatgcagtgacccctggaaatcagtagagaaatgtattagaaaaaaagttctggcaaagacctggctgattgttggccttattacacaacctcaggcattggtcacattagctcacagagctaagaaaaaccaagtactaaccttgttactcaagactttaggtactattgatttagatggataaaagatttattacaaagttatcctgaagaatatgtccctcatgcagaggacccaggaggttatgatgaccccagaaagcctgaccagcagtaacagtaaaagttacatagggacatgagtgcagaaatattatctctactgaaaataagttttatactagggaagagttacagggtatatgtagaactttagcacacgggctcaaaccagatgtataagttctatatggtttatgggttaacaatggtaaatccattatgcttatgagaagtgaattagcacaaatgattggaatagcaaataactccagggttcatgatgaattaattgctagagcacaaaataaccaagacctctctgacttatgatggggatgggtaacagcagtttggatgagacaatactcaaacatcattcccaggttaatctaaactaaaaaatggaagactttagaaggagtcattaaaatactcaagaatatggaagattattattaatgtctgatgggacagtactttatagaacacctgggaaatttcccatcaaaaatgactttttaaaaagtcaagtaatatatccaagataaatccaattactcacaatatacacataatataccataatgaggtgggaaattgaagaaaaataaaattgaaaagaaagagaaataagctttcctgtattaggctgacttgtcccagaggcacaaactggcacatcccagacccaagaaaagtcttgataatattatctaatgtactctggagactctcccagcactccctcaacatagggagaagaaaaattttcctttgttttagggtatgagtttatagattcttgttctctgtaaccagtaacttcaagtattctgttttatctaaaaagcacagcaaaggtcatgagaaggctgagcaggcctgaactacagctatctagacaccatagtgaaggttatgggataagcccgtgcctaggcaaacctagataatggacatctgggtttcatagcaacagttatgtgcaatcctgagttatgaacctgttacaatttgattaactgtctttgtcctgtctctgtatcctgctttcatgccactgtaagcttgcttcaagctagcctacccccttttgtgaagtgtgtataaaagtcaagtgctgtctttgtttcaggcccagtctttggatgtgagtctgctgggcctgagtgcactcaataagagattctcctgttttaacccgaggtatctcttgtcctcctaaatcctgcaacaatataagactgatttttgactgccgtaaaatctttcttgcctctaaaccaacacttcattctatagtttaatcttctttccactttttctgttctcttagcttaaggaaagattatggcaaactttgtatgtttttcatatgtacttgcaaaagattatacaattttgttttgattattcttactttaggctgaaacttccctaatcttcccttagagattgtggcatatcatgctagtttccttttcatatccaattgtttcttctgcatttatcaccctagctatgtgattatattttctgagcttccctgcagcttgttatagctatttgactaagccagtgatttgtaagcactgtgctatgtgtaccttctataaatccttcctccttcttctcttcatctaccaagcagtctggaatgaaaatacaatagctggacatcactagccctcctaggtaatgcaggcaggagtgaagggcaacacagtctattaacttatttactagaagataagtttcagaacaataagaatcttgtttatgttggtcaaagcaatatccccagcgctcacacaaagtgtatggcatgtgctaagggctcaggtatcaaatgggtattgaatgaatgaataaattaatagttcactctggagtcatgagtaaacaaggtctcagcttatttcacataatcaaactcctgatcaaatcacattactctatttttttatctttactgcctcagccttgccaatgttatagaaagataagattttttttaaatgtacatcaatattcctttccattaaaatgttttaaaagctgtttttataacagtgctttccaatattttcctgcttagcaagttcaaaattctaggacttcagacaatattattcttaacacagaatgcagccactggatcctgaggatttcactagatgttagttactgaaactgaactttcttgaattcttttccttccactgtggtctcccgcatttcaacatatcacctatacttgtcctcaaactttatttaaatttttcaacagaaataaattaaatattaatcattactcctgccctgttttttgaagtgatccttttcttcctatgataacaattcctctgggcccttttcatggccacttttatggttatagggtttgtaaatacattttttgcaaatgcatataattttattaattattttttactctacctccaaagttgttgctatttaactcttcgtgagaaaaattaaactcatgttttacttttgttatatacttatttatacttgagctccttgatttctgctcaaattgcttttcaagttacctgctttttagagaagacattatttggttttcattaggtgtatcaagcttttcttgataggtgtatcaacaagtgtagacttctctataaagaatttctttttccagagtagttttctgaaaagtctattaaaacagagaaaaatacaggtcttcgaaagagctcttcctaaacctcccctctaccagaaatatttctatagtcacatggtcctttctcccttcttgcttttgtctgagtccaaaactaatctctccttgatctggactgcatgcacttgtgccttctcagggcccttttgtgttttttcttctctcttgacttcaaaaatgaggtttctgtattggctgttaccctttaacatagaactatacccaccctttttaaaaatctcagaataaaaaggcttgctttaccatgtatctcctttactacctcatctctcttctcagcgaaatatttgggaagagaagccctcagtttgtgtcattgttttctcacctccagttcactttccccactgcctgacatccagctcactcatgcacatcccttgtcactaagttgccatagacaacgtttagctgtcctgccctcctggcaaaatttgactctgtgcattgggataatatgtattcagcacctattgaccaggcactgcgttaggtcctgctgttatagaaatgagaagcagacatcctctccattctgataagactcagtggagcagctattcctgattcatatgcaggtcgcttgacttggcctagcttttgcaagcttcacttaatgccatgtaaatctccctattctccaagtctttctttccgattccccttgctatacacaacttctcaaggcaattgtctccatgctcatggcttcagttgccttctctattctttgaggacaaaacaattataaatgttttcatttaatagctttattttatacaagatgcctcatttgctataaacatagattcaaagttgctccataaaagtaattgctaaaatatggtgacatttttagcatgtaaattttagggaatttccccaattactcttaatggtttgatttagtatgtgtattatttttgaaaatatatgttgggatgtcacaaatggacttagtctacagagatttatatccaactcttgactagagagctccattttaatgtgatgctgagactaaaaacctatcttttccttcttacctatttttcttcctacattctctgctaggagaaaggcaccactgtttccccagtcccccacaccagagccttagcagctctgttttccctgtatctcccctcttcttaacatataattaccaagcactacctattctatctcccaatgatcacaaaacttttccctttgctttaatcactgccactgcctttaacattactcttctttaagatgaagcctgttagttggtcctgttgtttcctgcaatcctttattattgttcagagtgaccacactgcacacacatctgacagtgatgcctcacctttgtatggttcaaagattctcatgttttcagaataaaattaaaaccaccccagcaccaaatttggaatcaaatagacctgggtttgtatcccaggttcatgcactgtccagaagtgtggtctcagaaaactgaactttctaagcctttgtttgcttatctgcctaaactctctgagagtggggactgtttcatatatacagtgcctggcacgtagaagggacttaattattattaagccaaaggataatttagagacacaaacaagaagacacacaaaatggagggtctaatgccagcctggaagaatgagatgagacagcaagaactgggcatttaggtagggaggaaagaaattgactgcaccctgtggggaaagactaaggggtgggaatgcaaggcagagccagtctttggtcctggtgcccagccctgggaaagctggctacaggccgatgtggaggatacctcccagggtaccctggggacagtgtcagccactgaatgaagaatgaaggggagacatttttaaatcgacatgaaaaaaatctttgttctttcaaaaattatacgaacctacaatatcacttcctctaaaagatcgacttccaccttcactttctgataatcaggctgggggaattggggaatatagactacctggaatcaaatcctggctacccctgagcagtcatgtgactttggggagcttacttacttcttcatctcaatttattctgtaaaatttgtaaaatgagattatttctgagggttaaatgagcataccacagttggaacactgtcaggcacatgctgtttgccagttgttgactattcatctttattgaattaggactatggtactctactttatggttctcaagtttgtatgagaaaatcatgcttagtgcattgataatcaaagaaacaaaatcagaaaaaccctgccatggaaggaagacacagaggggaaaaaagggagtgggctagtttcagtatttcagagcttgtggggacaagttagttccctattttataaacaaggaagtggaggcaggatgtgtcctgggatctcatgcaagatacacagtgataactccttactgagagtagaactagggtcccaggaattgctatggacaaagttctgacaaaaattaccccttggaagacaggaggagagggaggagagtgtttagatacaaaaacattcaacaatttaggcatatctaaattcagtgagcaaatgaaaaatgtactacttggcaaaacgaacttgctaatgggacccattctactaactgggacttcctgcagaacttatagaggaggatggcttcaactaacaaattggcctgtgctttcctcaggacctaaaagctcagaaagcctgtgatgaatgaaagcattagtcccaatagcactgcacaaggggccaggaaagcagcagcatcataaatgacagggtggggtagcccagtctgggacactgtgagctgtggggcagggcagcagctgggcagggcattgtgaactgtgggatagggcagccgggtggggcattgtgagccacatgcctgggatcccctgggtcagtgggcttcagtctggaggtgattgcagaaggaggagcagctccctttgttgtctcttcaggcagctgtagtgtctcttcagcatttgttgggttcacaacctatttaaaagccagctggtcttcaccctcccagacaagtcagctcaagggaggcggtggggtgcgggccttggcctgagccccacccaaggctgagctgtggggcagtcaggagagcagcaggcaagaccatctctgcaggcgcagtgaagccctggcctagagcagcaggtgtgagaggccaaacctgcaagctaaggcacaggtagtggcagagaggagtagaggccccccatggggaacacactgaactgttgtgtgtgccccaagtggggctggcaccggggtcgtgtgtggccctgtgagcctgagatctgtgaggcaataactgggaacacaacgccagtagcaccagtgcctgctgctgtatagcctactgaatttgcttttgaagctgttgagagcctccatgtacaccacatccatgaccaagagattccagaaggtaaggaggtgatggatgccatctgctcttggcacacctttggctgccactgtccccagggtcccctgggaggtatcctctacataggtctccttcatgcctgtagccagctttcccagggctgggcaccaggcacaaagactggctctgccttgtattcccaccccttagtctttccccacagggtccagtgaatttttttcctctctacctaaatgcctagttcttgctgtctcatctcattcttccaggctggcattggaccctccactttgtgcctcttcctgcttgtgtctctatttattatcctttggcataagaagcattatttgaggcttttttttttggtatattctctcctgcttctaaataatatctcaaataccccagcattccagtacctatccattctctctctttacctatccagatggtgcctaagtaaaggaaccaggtaagtgcccaagtgttcccttccttccatttattagcgtatggaagaaataatactaatactaatactcaggacaattcatacccaaatattttggaatttcttatttaaattcaaaatagaggttgccatggtattcttaataggttgttttaagtcaccttgatagaagctgctaattccttctaactataatttgaacacagaaggaaagaaaatggagcgtgcttaaaataattgggaaagatgtgaagtgctactgccagggctgcagaaaaattaacgtgttttccccccaaaggaatttacccatgaagttctgtttactttaaaattcccagtttacactgggcagggtggcttaggcctgtaatccgagcactttgggaggcctaggcaggtggatcacctgaggtccagagtttgagaccagcctggccaacatgacaaaaccacgtctctactaaaaataaataaataaataaatattagccaggcatggtggtgagcccctgtaatcccagctacttgggaggctgaggcaggagaatcgcttgaacccgggaggcagaggttccagggagccaagatgtgccattggactctagcctgggagacagagcgagactccgtctcgaaaaaaaaaaagaaagaaagaaaattcccagtttaacacaaaatgggtctccacatttattttggtgacttaacagacttcatttacctccttgttctaaaagagaagtggggcggttcatgatcaaaagcttcaaagagatgaaacataagtttggacttcaatttgtaatgtaaagattggaagtcaaaatgccagaccttaactatgcaagagtgtttgttgccatggttcctctttccccctcctgccagtagcatcttgttcaaagataagagagtaggagttcttcagactttaaacttctgggagaggcagggggatgggaagaggtagaaaagaggaaacatttaaaattttgcctctaaaattttggaaagagataaatctaggtaaaaataattctggataacaatatgtcttgaataaaaagtaaatcttccaaaatagaaaacactgtattgtaaagatatttaaatccagttggttcattggtttcatttaaatgtcagagatttcattaatttagaggaaatgtcttgtagctcttctataaaaactttggttgggctcttaagtttttaaaaaggtagaataattaagactcatgatgaatgtgactttgtaactgggatgtactatactcacttttcaggatatttcagaattgtcttagaataaataaatacgttatatgaattaattgattatacctttatccacaaagcacgtaagtacttgtgtaaacttctgctttgcttgaaagtgtaaggtaagactctgagtgattttatacatgagttagtagacgagtagttttggatgacagcccaaaatagactctttattgtcattcttcaggatttacaacacttttttcacttttttttttttttttttttttgagacggagtctcactttgttgccaggctggagtgcagtggtgcgatctcggctcactgcaacctccacctcctgggttcaagcgattctcctgcctcggccttctgagtagctgggactacaggcgcatgccaacaaacccagctaatttttgtatttttagtagagacagggtttcaccatgttggccaggatggtctcaatctcttgacctcgtgatctgtccaccttggcctcccaaagggctgggattacaggcgtgagccaccttgctcggcctacaacacattttatgtatgtctcatttggcccctccaaatacagataaggcctctgtatgttctccctatattgctaatgaagaaacaaaaagagatcttaaatgactagtaaaacagctactaaacagaactaaggtttgtaagtcctcagaatgacatggaaatgatagatatgctgaatttagttctttaaagtttttaaaactccagaatacatcttatattttactgtaaagtagacctgtcttttaaaatgatttttaaatgatttttaaaattatttattccatttaaagttcattttacacaactcaaaggcaacatttacctcttcatttttttctaaataaaggagagtctgactacgttacccatgctggcctcaaattgctggcctgggctcaatagacttttccaccacagcctcctgagctgctgggactacaggcatctgccatcttgcctggccctatctcatgtctatacatttatttcaatggataagaataaaagtagaggtagtgaaatagctcaggtttgtcattcaaataaacaagttgataaattctaaagaatttctcttggttactgtgaattgaagctgagagtgtgtgggacaggagaaggtggcaagaggcaggtaaggaaccaggcattaagcatagggtgataaggagtgttacagcagaatagctttaaaaaaagtttgtgagcacagaatttctcattttgtgttgattaccatgaccattaaatttttatttcaatttgtctttttaattgtatttgtgtggaattcaataaaacaataagcaaaatctcaatttcatcatttgcctattaacttttcataggaacacagcaaagcaccaaatgataaaagtatagacacattgaaagtttgcttctaaaatctttatttgagacaattttatattggtactcctggaaactgagaaatttctacttagatgtgaaacattttggttttttttcaatgaggaattaaattatttcggttgtttagaaaaaattagacacaagttatgctttacttttgtcttctctcctgaaacatttcagaagaacgagatttatttaaggcatttcagaaagctgtttctaagaacctggaatagatttcagattactcaaaagtgttttttactaccttaccttcatttagcagcctagctaatgtaactcaaggtagtaactgtaacacaaagtaaggtactgtgatcttattatccagtttcactgttactcaccaatttttcatgcagccttttatgttctgactttagaagctttactaatttgggaggtaaaggtgctctccagtgacccatttctttcccctaccctagcggtgagggaaggaaagaatggacaatatgaagtgaaaaagcctctgagcaacagacttgtcctcttttcagtagctattttaagccctcctttccaatgtgtttaatggaaaacatacagaaaatacagaaaagtaatttgttctactcagaatactcaaagctaatattcattatgattctgatattgattctttcttaatctttatgcatgtgaatataacatttcttcaaaaacaagattactgtatatgtgctgcttcctaacttttacctaacacagtgaaataatgacataagttcctgaaacagtgcttgacatctagagagcactccaggatgtctttccatgcctgtgcacctgcaccctgttctacctcatgccttctaatagaatattggtataccatggactggttggagcattacttatttacttgtcatttatgactgtatatcttttatagtaacatcatacacagttccattttgtttgatcatgcggacacagataaaaaatgtactttgataactgatgcattgtacctccctataaaattcagatggtatatttttgtctcagaacataaatcaatgggatgagtcattttgtagttagggtagtttagtattaaatgttcctttgccaaactgaagttaaccattgactattcactggatattagcatttctcattaaagtttttgtgattcttggtagctcttttgcagttcctggcagttctgaatagctgcccctttaagagttctgatgctgtcttagatgaccaatcaggagacagcactagaagaaatcttagaagatgtgggaaaactgggagaacttaactagttttaggtatactgaaacatatgtaatgagcatatgtgttccagatgcagggcaaatggtactacacaagacagactgcccatcctaactctgaaccttacattctagagggagctagggatcaatagcacttgaataatcaagaatgtgaggtggtgaaatgtttagaagaaagtaaaacagagcaatggattgaagaggagggcagttttacagtagggaaggaggcagaagttggctgctttccttaggtgacatgcgagcagttctaaaagtgaggggaaacttgtgaggatgtggagagcttccacacagaggaatagctgcttttgagttccttaaatggaagcaaacttggtttgaccaaaggacaaaaaaacacaagggtggctgcagcagattgaaagacaggccaggtggttaagaccttacagaaagacacaaggatggctgcagcagagtgaaaggcagaccaggtgggttaagaccttgtatgcaatatgagccttgacaaagattatagactttgtgatgagaagccattggaggaatatagcccagggaatactgatagttctttaagaaaaagatcagattagctgctctgtgagaatatgctgggatgcaggtgagggtggaaggaggcagaccagctaggaagctgatggagtggttcagatgagactcaacagtgaacagaaaaataagaaggacctgaaataggctgacttgaagaaattaagtgaatccggaagtaggtaacaaagtgatcaatagacaagtcacaaaaaaatgcagataatctttaaacacatcttaacacataagagaaatgcaaatgaaaactatgctgcagtttctctcttattgggagaaatttcaaaaactttccaatacattctttggtatggctgtgaaggaagttgtgtccatatgttgctggtggaaatgcaaagtggctcagctccataaagaaaactttgacataatcttacagcattgcaaatgcatttatttatttattttattatactttaagttcaagggtacatgtgcccatatgcaggtttgatacataggtatacatgtaccatgttgctttgctgcacccatcaactcgtcatttactttaggtatttctcctaatgctatccctctcccaggcccccaccccgcaacaggccctggtgtgtgatgttccccatcctgtgtccaagtgttctcattgttcaattcccacctatgagtgagaacatgcggtgttcggttttttgtccttgcaatagtttgctgagaatgatggtttccagcttcgtccatgtccctacaaaggacatgaactcatccttttttatggctgcataatatttcatggtgtatatgtaccatattttcttaattcaatctagtattgatggacatttgggttggttccaagtctttgctattgtgaatagtgctgcaataaacatatgtgtgcatgtgtttttatagtagaatgatttataatcctttgggtatatacccagtaatgggattgcagggccaaatggtatttctagttctagatccttgaggaattgccacactgtcttccacaatggttgaactggtttacagtcccaccaacagtataaaagtgttcctatttctccgcatcctctccagcatctgttgtttcctgaatttttaatgatcaccattctaactggcatgagatggtatctcgtggttttgagttgcatttctcagatgaccagtgatgatgagcattttttcatgtgtctgttggctgcataaacgtcttcttttgagaaatgtctgtttatatcctttgcccactttttgatggggtcgtttgtttttttcttgtaaatttgtttaagttctttgtagattctggatattagccctttgccagatgggtagattgcaaaaattttctcctattctgtaggttgcctgttcactctgatggtagtttcttttgctgtgcagaagctctttagtttaattagatcccatttgtcaattttggcttttgttgccattgcttttggtgttttagtcatgaagtccttgcccatgcctatgtcctgaatggtattgcctaggttttcttctagggtttttatggttttaggtctaacatttaagtctttaatccatcttgaattaacttttgtgtaaggtgtaaggaagggatccagtttcagttttctgcatatggctagccagttttcccagcaccacttattaaatagggaatcctttccccatttctcgtttttgtcaggtttgtcaaaaatcagatgactgtagatgtgtggtgttatttctgaggcctctgttctgttccattggtctatatatctgttttggtaccagtaccatgctgttttggttactgtagccttgtagtatagcttaaagccaggtagtgtgatgcctccagctttattctttttgcttaggattgtcttggcaatgcaggctcttttttggttccatatgaactttaaagtagttttttccaattctgtaaagaaagtcattggtagcttgatggggatggcattgaatctataaattactttgggcagtatggccattttcactatattgatttttcctatccatgagcatggattgttcttctgttgcaggaagtcagggaccccgaacggagggacaggctggagccgtggcagaacaacataaattgtgaagatttcatcttaatatggaagtttatcagttccgaaataatacttttataatttcttatgcctgtctgtactttaatctcttaatcctgttatctttgtaagttgaagatgtatgtcacctcaggaccactgtgataattgtgttaactgtaaaaactgattgtaaaacgtgtgtttgctgtagtcccagctactcaggaggctgaggcaggagaatggcgtcaacccaggaggcggagcttgcagtgagccaggatcgcaccactgcactctagcctgggcaacagagcaagactccgtctcaaaaaaaaaaaaacaaaaaaaaaaaccatgtgtgtttgaataatatgaaatcagtgcaccttgaaaaagaacagaataacagtgatttttatggaaaaagggaagacaaccataaggtctgactgcctgtggggtcgggcaaaaacagccatatttttcttcttgcagagagcctataaatggacgtgcaagtaggaaacatattgctaaattctttcctagcaaggaatattaatattaataccctgggaaaggaatgcattctgaggggaggtctataaatggccgctctgggaatgtctatgttgtgcagttgagataaggactgagatacgccctggtctcctgcagaacgctcaggcttactagggctgggaaaactctgccctggtaaatttgtgatcagaccagttctctgctctcgaaccctgttttatgttgtttaagatgtttatcaagacaatacatgcaccactgaacacagacccttatcagtggttctccttttgccctttgtcctgttccttcagaagcatgtgatctttgttggacccttatcagtggttctgctttttgcgtgttgaagaatgtgatctttgtacctactccctgttcttacaccccctacccttttgaaacccttaataaaaacttgctggtctgagactcaggtaggcatcatggtcctaccaatatgtgatgtcacccctggcagcccagctgtaaaattcctctctttgtactgtctctctttatttctcagccagtcaacacttacagagaatagaaaggacctatgttaaaatattgggggtaggttcccccagtattcttccatttgtttgtgtactcttttatttcattgagcagtggtttgtagttctccttgaagaggtccttcacttcctttgtaagttggattcctaggtattttattctctttgtagcaattgtgaatgggagttcactaatgatttggctctctgtttgtctgttattggtgtataggaatgcttgtgatttttgcacattgattttgtatcctgagactttgctgaagctgcttatcagctcaaggagattttgggttgagataatgaggttttctaaatatataatcatgtcatctgcaaacagggacaatttgacttcctcttttcctaattgaataccctttatttctttctcttgcctgattgccctggccagaatttccaacactgtgttgaataggaatggtgagagagagcatccttgtcttgtgttgattttcaaagggaatgcttccagtttttgcctattcagtatgatattggctgtgggtttgtcataaatacctcttattattttgagatatgttccatcaatatctcgtttattgagagttcttagcatgaagggctattgaattttgtcaaaggccttttctggatctattgggataatcatatgttttttgtcattggttctgtttatgtgatggattacgtttattgatttgcataagttgaaccagccttgcatcccagggaagaagccaacttgatcgtggtggataagctttttgatgtgctgctggatttggtttgccagtattttattgaggattttcacatccatgttcatcagggatattggtgtgaaattctctttttctgttgtgtctctgccaggctttggtatcaggacgatgctggcctcatgagttacggaggactgcctccttttctattgattggaatagtttcagaaggaatggtaccacctcctctttgtacctacggtagaattcagctgtaaatccatatggtcctggactatttttattggtagactattaattattgcctcaatttcagagcctgttattggtctattcagagattcaatttcttcctggtttagtcttgggagggtgtatgtgtcgagaaatttatccatttcttctagattttttagtttgtttgtgtagaggtgtttctagtattctctgatggcagtttgtatttctgtgggatcagtggtcatatcccctttatcattttttattgcgtctattttattcttctctcttttcttctttactagtcttgctagtggtctattaattttgttgatcttttcaaaaaaccagctcctagattcattgattttttcaagggtttttcatgtgtctatctctttcagttctcccctgatcttagttatttcttgccttctgctagcttatgaatttgtttgctcttgcttctctagttcttgatgttagggtgtcgattttagagctttcctgctttctcttgtggggatttagtgctataaatttccctctacacactgctttaaacatgtccctgatattctggtacattgtgtctctgttctcattggtttcaaagaacatctttatttctgccttcattttgttatttactcagtagtcactcaggagcagtttcttcagtttccatgtagttgtgcagttttgagtgagtttctcaatcctgagttctaatttgattgcactgtggtgtgaaagacagtttgttgtgacttctgttcttttacatttgctgaggaatgctttacttccaattatcaggtcaattttagaataagtgccatgtggtgctcaggatgtatattctgttgattttgggtggaaagttctgtagatgtctgttaggtctgcttggtgcagagccgagttcaattcctggatatccttgttaaccttctgtcttgttgatctgtctaatattgacagtgggcttttaaagtctcccattataattgtgtgggagtctaagtctctttgtaggtctctaaggacttgctttatgaatctgggtgctcctgtattgggtgcatatataggatagttagctcttcttgttgaattgatccctttaccattatgtaatggccttctttgtctcttttaatctttgttggtttaaagtctgttttatcagagactaggattgcaaccgctgctttttttgttttccatttccttggtagattttcctccatccctttattttaatcctttgtgtgtctctgcacatgagatgggtttcctggatacagcacactgatgggtcttgactctttatccaatttgccagtctgtgtcttttaattggggcttttagcctatttacatttaaggttaatattgttatgtgtgaatttgttcctgtcattatgatgttagctggtttattttgcatcattagttgatgcagtttcttcatagcatgaatggtctttacaattggcatgtttttgtggtagctggtactggttaattctttccatgtttagtgctttcttcaggagctcttgtaaggcaggctggatggtgacaatctctctcagcatttgcttgtctgtaaaggattttatttctccttcacttatgaagcttagtttggctggatatgaaattctgggttgaaaattcttttctttaagaatgttgaatattggcccccactcccttctggcttgtagaatttctgctgagagttcagctgttagtctgatgggcttccctttgtgggtaacctgacctttctctctggctgcccttaacattttttccttcatttcaactttggtgaatctggcaattatgtgtcttggagttgctcttctcgaagagtatctttgtggtgttttctgtatttcctgaatttgaatgttggcctgccttgctaggttggggaagttctcatggatgatatcctgaagaatgttttccagcttggttccttctccctgtcactttcaggtacaccaatcaaacatagatttggtctcttcacatagtcccatatttcttgaaggctttgttcatttctttttactcttttttctctaaccttgtcttctctctttatttcattaatttgatcttcagtcactgatacccttccatcctcttgatcgaattggctattggagcttgtgcatgcatcactaagttctcataccatagttttcgaccccatcaggtcatttaaggtcttctctacacttagccatttgtctaaccttttttcaaggtttttagcttccttgcaatgggtttgaacatgctcctttagctcagagtagtttgttattaccaatcttctgaagcctacttccatcaattcatcaaagtcattctccatccagctttgtcccattgctggcaaggagcagcaatcttttggaagataagaggcactctggtttttagaattttcagcttttctgttctggtttctccccatctttgtggttttatcttcctttggtgtttgacgctggtgacctacaggtagggttttggtgtagatgtcctttttgtttatgttggtgctattcctttctctgtgttagttttccttctaatagtcagttccctcagctgcaggtctgttggagtttgctggaggtccactccagaccctgtttgtctgggtatcaccagtggaggctgcagaacaacaaatattgcagagcagcaaatattgctgcctaatccttcctctggaagctttgtctcagaggggcacctggctgtatgaggtgtcggtcagcccctactgggaggggtctccaagttaggctacacaggggtcagagacccacttgaggaggcagtctgtctgttctcagagcacaaacgtcgtgctgggagaaccactgctctcttcagaactgtcagacagagacgtttaagcctgcagaagctgtctgctgccttttgttcagctatgccctgcccacagaggtggagtctatagaggcagtaggccttactgagctgaagtgggctccacccagttcaagcttccagccactttatttacctactcaagcctcagcaatggcggatgccccttccccagccgcgctgctgcctcacagttcgatctcagactgctgtgctagcagtgagcaaggctccgtgggtgtgggacccaccaagccaggcatgggagagaatctccttgtctgccagttgctaagaccttgggaaaagcacagtatttgggcaggagtgtcccatttttccaggtacagtctgtcatggcttcccttggcttggaaagggaaataccctggccccttgagcttcctgggtgaggtgatgccccgccctgctttggcccgccctccgtgagctgcacccactgtccaaccagtgccaatgagatgaaccaggtacctcagttggaaatgcagaaatcacccatattctgcgtcgatcacgctgggagctacagcccagagctgttcctatttgaccatcttggaacagatcccctgtaaatgcatttaatccagaaattctactgtgaataatttttcctgaaggtgtatccatgaatataaaataacataaacacaaaatttttgttctattattttcaatagcaaaatattggaaataactcaaatgtctagaaagggactgataaaataaagtgatacaacaatgcaaaggagaactatggagttgtaaaaggaatgaaatctctctttactgctgtggagtgatttccaggttatattatgtaaaaaaaaaagcaatgaggggctgggtgcagtggctcacacctgtaatcctgcactttgggaggccaaggtgggcagatcatgaggttaggagatcgagaccatcatggctaacatagtgaaacctcatctctactaaaaatacaaaaaattagccagacctggtggcaggcacctgtagtcccagctacttgggaggctgaggcaggagaatggcgtgaacccgataggtggagcttgcagtgagctgagattgcaccactgcagtccagcctgggcaacagagtaagactccatctcaaaaaaaaaaaaaaaaaaagcaaggaggagaatgtacagtaatatacataaaagaaagcaggggaaacatgtatttgcttactgtaaaaaaaaaaaaaacaacactggaagggattcttgatgatgatgtgtgacagtttttcccttaacttcagtgggtagacaaagtgcatatttgctcaagatgttattttggcattggttttccagtgaatgctaaccatttattttttgcttttgagttaatttgtgaaagcttttctttgtaatttattgtttattttttagcatatagattgctcttgcatttcatttgatcctcataatattttgaatttgttgatataagaattatacttgttttacatgtgaggacaaggcctctgagaagtacaaattaggtttttcaaggtttggatatataagacttggtaaactgagagtgtaaattctacataagactagaatttatagaatgattcatgagtttatttgaataccctttttattttactttcttaaagtttattaaagtaattaggctttagagttaaaactgtaatagtcagtggtgagaaatgaaaaggaggtacttataacccagaagtgttcttcttcttttaaagacagattattgctctcactcaggctggagtgcagtggcacgattgtagctcactgcagccttgaactcctgggctcaagcaattctcccacctcagagcatctgaagtagctatgactataagcgtgtaccactatgcctggctaattttcaaaatatgttttatagagatgagggtctcactgtgttgtcctgcctggtctcaaactcctggtgtcaagcaattctcccacattaacctcccaaagtgttgggattagaggcatgagtcaccacagctggctcagaaatgttcttaaaagcctaagaagtagagttaagtgctcttaagacatatataggccaggcgcagtggctcacgcctgtaatcccagcactttaggaggccgaggtgggtggatcacgaggtcaggagatcaagaccatcctggctaacaaggtgaaaccccatctctactaaaaatacaaaaaattagccaggcgtggtggagggcgcctgtagtcccagctactcgggaggctgaggcagaagaatggcatgaacctgggaggtggagcttgcagtgagctgagatcacgccactgcactccagcatgggtgacagtgcaagactctgtcaaaaaaaaaaaaaaaagaaacatataaagggggaagtatactacctaatgtgaaatgtcacagctcagtcacagtcactaaaacagatcgaggagttaaaaagttatggcaagactgagaactgacatggaggaacagcagtggttaggaagcccaaggtggggttgtccgacctgggaaagcagaaccaaggcatgagtgagcctgagatgggcacaaaggagctccacgtgtgccctcaggtgatacaggcaggccagctcaaggctatcaggtaggtagcatctgatatgtgaaaagtctggccttagataaaatctcaaactgcatcataattgagagacttggaatgtttttatgggccataaaactaataccaggtacagtatagggatgatagagcaggtcagtaaatgcagtaagtctttacataaacagatgctcagcagtgggctcagaaagtgttgacgtattttatttaattgggatatatgaaaataatatgttgaaattaatctctttctctgaatatgctccttctgtcagttaattccttcattactgccctctcccttttaatattttgacaggaaaaattatttcttgcataattttacaagttttacgtaagtttacagttgcataactttaatacctttggcctttaataatgcatcttacttattctaaattgcatacattgttttgttacatttttaacatctttacaattgagatagatcttacgactaatagaatcttagagaaaaaccggtattcagtgtcagcgagtctacagattccttcctctgagggatgtttacatttagacctgagcataactgttttttaagtcatacgtttccccatcattcttttatgctgccagatcacgttgtaacttaaattgataatacaaaaacactgggtcttaaaatacagtgatagttataacccctaatcatgagatcaaaattattttcctagtttcctagtttcaaacattttaggaggttacaaaaataattttgaaggtattcacatcaagttgtgtagttattgtgtttttatcctctggatgtctctaaatctccacaggtgcctgtttatggggcctaatattttatttaatagttggcagtcttttgtgacaatgaaaaaagagtagtgtgatttctcgactctccttaggctcttgggaaaagagttaatggagaatgaagaaataacagtgtatgtgtttaagtttctgtctaatggcttaagtgtccattctataaaatagcaatatgtggtatttgtcatcagcagaaattacaagttatatagaaaattgtggtaggctatagacataaaatgaatattttctgaaaaccccatgcaaataaacactagtaaattcctagtgaattcagtacatacagtatgtacaaatgatatgaaactcatcaaagtggaaataacattgttaactatggaaaaatggtcaaagtgtataatctaataaacaaatataagttagagcctcaatagtgttcctccttcacatcagtaggaatttttttaagtatccaaagctgaactagaagctaaaactggtgtgatttgaagcactgtgccctaatatgcccatatcttctttagaaagcaacttagcactatatattgattcatgaaaacaatctcacctttgttctagtcattccacttttgaaaatctttccaaaggatctctaagaaaaagtacaagatactatacatgaaggttttcctcataagaacaaaactttgtaaatgcctaaatcaccgacaatagggcattggctaagtaaagtataggaataacacttgatgagccaatattttccaaaggggtcaaggtcatttgtaagaaaataaaacataaatggtgtactgcttagagctatttttttaccatgcataaggaaaacaaaaagtaatggttgtgagttttaaacaaggcattattttggctcttgcaaatttctgttcttgataagacatttcttaaagaagtaagcaagagacttttacctattcctgcctttagtgtaatcatcagtactatcagcagtgctgactaaccaagtctcttacaattgccagttgaagaaaatctacctcaaaatagttaaaaatgtttattgaaaaattaacttgcatagccagggagttaacaggagtcagtgaggcactgcttgaccaaggaatcaaatgatatccccagaacctatctcagttatgctcttctctgttgatctctcctgaaaatacccttctcttgatggtaatgggagccactggcaactcctggtcagctaccagtcctgtgagccagttcatcctttctcctctagttcttgggaagtcccagatgaactgcgattgactggccaacctctcggtcagatgcctaaaaccccaggaatgggagagtgacagcttgttacttgggctgatcttgttttatttcctgtatgttttcatttcttcttgatttttgtattgaaatacacaatagcacatcttggttttatgtgtggggtatatgtgtatgggcgtaagcctgctactttttgaatcttgtacataattttcctgggcttccatggaaaattccaaattaaacattatgacacaggtactgaaacattatatgagttctgcaaacattacttgttatgtttcacactcaaatgataatatatttgcttttttgatacaaagtagtcatggactttttcagaagctttaggttagggacggctatacaagtctcttcctgtcatgttgtgcacaaacaattttatttttccacatagctaacattatatcatcaaattttcaaatatgtgggaaaaaacttgaaaatgacttttgtgtaagttttttacataacaatagttttctcccagtaaacttcaaatcatggagaaaaagcagattttttagctatgtaatattctagtgagatggcagtattattaaaatagatgattcggatttctgctaaatcagaaactcctaaattatttttatactagattctaaccactttagttggagggaagaaaaggatcctgggtagataaatttgtgaaatgctgagttggacattattcactaacgggctgattagtttttactgtaccactgtgcactttgattttgtaaaagcaagggatagagtggattgtgatttgcccactaaaaccctttttaaaaagtagaacagttactaatatgtgatttggaaaatattgccttaattattactctgagtggatcttcacctagtttcttacaagattgcttaagataagtgggttgagatggacagtgctgaggagtgtcataggtttttattgttttcccttattacaccttttattatatgatgaaaatgtgtaataaaaattcaagaatattatttttagtcttgcttaaatggattatctcactttggtgcaaggtggactgtaaacagacctaccttgacatacatagggccaacattttttagaagaaggtctaagtaagatctgtttcaaaagtattcttgatgaagtcccaaatgaatcatgtgttggaaagaagtgagattttagctttggaaatggagggcaaaagttaaaaatcattttctgacatgaaagtgtccttatagattagagcattgaaatttttatgcagtccacttaaatctgccatgatgaattgcccctgaataaatcacagataagtaaatgaattagccatgttattttctgagggatagtggccaaaaaacagctctttattttagcatgtttgatatattgagctaatgtctgacagtaatttcacacagcatcagttgctgcttgagcctattcctaaaatgtgctgcgaatatcagtagagaggcaagtgattatatttttatttgataagtagaagtggtagatgcaggaggcagatgagggggagggtgtccggagaatctgtgacctgcctgtgcactgggagaatggggtggggtcacgggaagtttgcatcttgtgcagtggggaggagcctggcctcttcagcttgtgtgtggtggcctggtattcagtctgtgagttgggagcccgctggaaggatcccctctcgcttttctgagattttttgttcctttttgccaaataaattctgttctactcacccttcaatgtgtccttgagactaatctttcttggtcgtgtgacaagaacctggttttagctgaactaaggagcagagttttgcagcagaaggagcagggcatgtatatgacttctcttttgcattagattatttagttttagtctttttgaaagtccttgacatagcccagttttattccatatgtatacagagaggctataattttgcattcccaagtagaattattatatttttgcctttatttccttcatatttattactagaaacttttttcaggactatttaaaatgattgaaatgaatgtgtagctactttaaaaatcattttttctattcgcataaattatcacatttttttttctctgtagatagagctttggagccaaacccttctgatgatccaagggcaagcacagtcttcttgcaaaaatctcaaacagatggtgagacgacactgttttttccaccaagaagacgactgaaaactctctgtcataatgagtgtattatagaaagcatttagagaaacttacattggtttaaaattttcaacttttcatatattcacttgtcctattttaatgtgtgaaatacttctctttagttgttactgtgtgagtgaaaacatgtaaactttctgtttatacattttgctaccttttggcaacaccatttgtcatgtgatttaagagtagtcatagatttatctttattcataattttttattcatattttttgtctttcgccctttttcccttgctccaaagagttcattttaatgatgaatgatagaatttaggcttcagcttgatctttatttaaacaaataaaaaaaccatttgttcatcaatggggattgaatttgtgatttcagcctcctcttatacagtgctttaaccatatgagcttatcacatccaagtttatgctactcaaaacttttaagctattaaacttttcctgctaatgtaatataaatttaaacatccagtactcctgcttatattttaaatgttatggtaaatcctagtttatttgattaaaaagccatatacaaccaagttttttagttgatttcaacagcaagaatataaatgagggttctataataatatttgaagtaatgcagtacaataaaatttgggtttctaattgtgcttttatggtttgtgtggattttgcctgccttaagtcagtcatctctggtcaggacttgtgtttgttcatttttgcattgctataaagaaatacctgagtctgggtaatttattttttaaaaaagtttaattgggtcctagttccgcaggctttatgaacatagcttcaacacctgcttctgctgagggcctcagcaagcttacaatcataatggaaggcaaagggagagcaggtggtttcacatgagagagggagcaagagagaggggaagggggaaggtgccacactcttaactagctcttatgtaaattaccagaatgagaatttgctcattattgtgaggatggcaccaagccattcataaggaatccactgccattaccccaacacctcccaggaggccctgtctccaacattgagggtcacattctcatatgacatctggagggggcgaaatatctaaaccatataagaattgtatttctcagttccttccagagccatgggcttctcacagagtgtgtggaagccctgaaggctatttcctgtccctcaagtcttcagtggtaggaatgtttgcctttaaggccttccagcatcaaaggaggaggcagtgtaggaaacaaagcatggcccaagtccctcttggagcttttattattctggcctttgttagaaaaaaaaaatgattttgtttgctgcagatactatgtccaattaagtttgcatactcattttaaaatttaaatgtaagataggttactttccagttgtgcaaagacacattttttttgttagtgacatattagtagatgaccaataagtggtttgagatgcttacagggattctggtgcatctacagatttgtaccttgccaggaactagttcttagagctgctagctcttagattctagtaattaaagtaagccatgtgtaaacacagagtgagaaaataccaatgaatcatggctcatatatgcaacagttgttaaacttatttattagctaaatttctcatctggcttaatttgttatgcccctttttttgtacatgagcattctttcatttgactgtaatagaatagatgatagatgatagatagatagatagatagatagatagatagatagatagatattttttttaccccgagatggagtcttgctctgtcgcccacagctggagtgcaatggtgcgatcttggctcactgcaacctccgcctcctgattcaagtcattctcctgcctcagcctctcaagtagctgggataacaggtgcatgccaccatgcctggttatgaatgtaatagaatatctgttaggacaaaaagtaaagccaaatttttagattttactttataagatttattaggccctataatttaagttataaatagttggaaattatttttaaatggaattttgtctcatttacatagagataatcaatcagatgttagcaactattttattttatatttgtatcagaactgattttttttattcttagttcaagaaaagagaaagagcaacgacatgaaccatgtaagtaaatagtcacaaagttaagaaattcatagtttgaagtaaaatatgtctatcttgattccttaaaaataaaatgaggacccagtgttattagcatggaactctctttgtggactttgtaaatctcttctatctttccaagtatcagatttatgcagaaaagtctttagcttagtgtgtccatcttttaaaggatctgacatgcaagttaaattttaagaatgtggttggtataaagatctttatttaatcttaaaataaatcaaacaacaaaattagaataactaagttaattttccacactgtctattgactttctggtatagcaggtaaaagcacagctttctgggtataccatgacattatttttttcccattgctttgtccaattgtagcacatttttattaaatcagtaatatttacatgattctgcttatgccagtattatttactgctaagtcatacggtgtttcagctgtgcatcttcattacgtatccttcattcctttaaacagttctggcatctgagcacttcttcacttctcccagataatccttttcctggcctatgttagtttacccagccaaatgcagtaagtagccgttggctggtctctctgctttcacatcctgtaatttttagcatagaattaattgtctgactatattcatttgcctgtctctaacagttattcttaccccaagtgttgtaatatttgtcacatgcatatcaaaaatattcatcagctcaaatacatctgttttatatttctcttggggcaattttccttggccttttgtcatcctagttcagtgtagagtggctttcctagatgtgctacatgcttgcttttctaagctatctcttgaaagtcttctgagatctcacttaactgccctcttctgtgagattccctgagtcctagattctgtgtttccttctgccttgttatcttctctagttgtactagagcacattttcctgggaaagggcacatgggaacatgtttagagacccagccaatcttaaaacccttcttctttgatacagtataaaattttaggttgcaaacaactaaaatgcatactaatagaaataactcaatttataacaatatagttagaattaataccaagttaatttcagtagtatataaaatcttgcttctaaatagctctgttctctaccctcttctttgtgttattgttatacaaattacttctgaatacactattagccaaaaaaaaaaatttaggttgaaactaaatgttacagttctaaaggtattttgtaattgtgttcttattatagtattgttttttaatctgttgccattgtgtgatacattatttgtaaccgggttttacatatctctagaagcttttcaggaccttctttctctctgggattctgaaattttataatgcagcttggtgtggggatcttttctctttattggggctactaagtcttcagattatctcttctagagaatttcttttcttctctattttctctgttaaatttttctgatattcttgttattcagatgctgggctgcttagactcctgtatccgcattggtttttaatcccccaccccctcctattttccagtttgtcttttcattctacttcttggatatttttttactttatagtttaatatttctcatgtttctcttgttgagggcatttttttaaagttttgctccaaaatttttactggtcccatgaattattttttcctgttgttttgatctctcttgaatggtggtccttggctttcattggaagcaggacttctgttcacgaaggagactcactgtgaggttttggaaatgaagccagcatttcatttgggggacttcagtgtattatctggggatctttactctgggaccattccattccttccgagaaggctctcccaattttctgcctgggatgtaaaagcatggctacttgctttccagaagcagaggtggagttgtgtttcttgctgtacagtttttttccatctctcaggttttagctatggtatctctgaacccagaaatttcaggttttatatatccagagaacacacatttaaattccttgtaagatggaaggacaggtagacttggggatctaaccacagattttcaactgacctcgctcgcttttattttatgtctcaccctactttcagagatgccatttccctttaagttgaagtctgccttgggttctggaagacaaactggcttgcttgtttctgttccagtcacttcttgtaggcaccaaagttgtgctaccatgccagttaccactccattatctactttttataattcagcatttattaaaaatcatcagtgtcaatcttccctattggtcctgcatataacttgagttatatgagtaattctaatgaaatttcaggagagagggaataaatttatggtcaatctattacatttaacccaaatttatgacctatatttaaagtgtaaattataatttaatttcaatataattaatattaatccagataattttacttatatatttataataaacattacacttttataccattacctttttaaattttctttttatttctgagacaaggtctcactctatcattcaggctggagtgcagtggtacaatctcacctcactgcaatctccacatcccaggttcaagcgattctcccacctcagcctcctgagtaactgggattacagcgcccaccactgtacccggctaaattttagtagagacagggtttcatcatgttgaccaggcaggtctcgaactcctgacctcaagtgatctgcctgccttggtctctcaaagtgctgggattataggtgtgaaccactgtggccagcccttgtttagtattcctattcaaattttataccctgccatattgttccattacttcacactataaatggagctgttttcattaatgcccaaagtgttagaagtattaaattaaaatgtgttcatttttagcgtggtcaacatagcaagactgcatctctacaaaaacattaaaaaacaaattagccaggcatggtggcatgtccctgttgtctcacctactcagcaggctaaggcagaggattacttgagcccaggagtttgaggctgctgttagctctgattgtgccattgcactccagcctgggcagcaaagtgagactctgtctaaaaaaaaaaaagttaattttttgaaaaatacctaaaatttgtcctcccaaaaaggagagagacagaagtaaactttagaattttcaatgggctaaaacaaaaggcagcaggtacaatgaaaaaaagtcagtataggagttcaacagatactggacctttgatggtaatgttttggttttggcttactaaactataaggtatgatgattttctagtcttcattattcaaccttaagaatactaagtaacactttccattttgtgttaaagtttgtaaaattttatattcttggtatttatgctgactgaatgaagataatttgttcctttctagttttgactacctgaaataatacctataaatggtaaattgttactgtatttgatataattaaatatagtaagatttatcttccaaattggaactgatttaattaatttgtcaagcacttgttgaacttttaaacttgtccaaaattctgtgctcagcatctccaggtagagaagaaaggactctcccttccttggaaagacctactttcttatgaggggaatactctgtaagaattggtatcatgtgacaagttgtgaattagactgactagtttacaaaaatggaaatattctgtggtgtggttgctggcaaaggaatcacagagggtaaatggggtcaagtttgctgggacaaagaaaaagaatcctaggcagagagcagcaggaaactgtgtggcaggaaaatgcctatgcgcaggtcaaatgacttgtagaataaaatgaatcaactttggaaatgaatggaaagtactctccgagagtctcatttgagtgatgtcctggcagtcttattgaaacatgaagtgaaagttaaattcgtagagttgtctttgttatctgttttcaggatgtgagagaatattaaagtgatagtctttttatcttctatgtaagaaaacaggactagagaatgctatggctttctctgttgttggttatggagcagccctggcacacagagcctctgaatctaaaacacttgttttgtcccactgtctcctggaatattacatttaggattagtaacttagtaatgtagcattagtcttcattcattgcaataaaatgctcttgtgccaatattatttaatgcattacagcttattgcagtaagtaaataatagaaaatctcagctgctttatattgctttaaaaacactgacatcttaaacatttctcatttataaagaaggggaattcacaatagacgcttgccaggtctgatgataggtaccatattaagggcagccttttataacccatttctcaaacatcctctattgaatttaagagcctccaatgggtttcctatggagtgcacataagtccacactcagttcacgaagtgtaagaagtaccttagtactttgtcatttgacattttaaccaatgggaaaaaatacacttttataggtttaacttactgtgatgttttcttctatttcctttccccttcaggtatctactaagcattttactaaaaagtacagctcgtgttcaaccatatacctagatgacagcacagccagccagcctcatcttacaatcatagtaaaatcgtgagtacaactatgatgtcaagggacacagccccttattctaagatcatcctagccatcctcggttatttcagccgtttgattgtccttttgggcaatcagtttaagaaactggtgtcaactatatattgatttctgattctatatattagttttcaaaaaaatactaattttcagtttctcctttaactttagatttcacgttggaagggaaaattagttagcaaataatcaatccctggaaaagtatagttatttatttgatgcttttatgccttatgacaatgttgaacacaatgagtaagataggtgtcctttataggatgttttccccccaaaaaaaggtttcttatgagttacaggcctaaatcaatcaatgtgtactagttttgacattaatcttggaagaaagaacaactttttctctactggcaccgtagtgtatctgcatttgacttcccttcattttgcatgaatacctcatagggcacaagtgaagatgcacttttagaacaacctaagacgagcctttcaagtttattttaaaagcaacaacaacaacaacaccagctctgttggggttgtctagagaacatcattatcatctgcttggattatgagcgtttaatttttggaacacagttttagaacacagtttggaaagtgctaatttagaatattaatgtctttatctttcattgtacttctttttcttcacaagaggatggttgtcagttttacttttcattctataaacatagctagcttataaacaattttgtttctaatgcactagctttcctagccaaaccaattgtcagtaacttctattttaattaaaagtaggaagtttacactcatgataatgtcacttttctatctcacttctaacagtggttgagataaaattgtgtttcagcaaaaacttgactcaaactctgtctaaagtcttaagctttgtgacctattaagtaatccctaaacttctgtattcagccaagtctctaaacccttgggaaaaaaaattactgtactttggctagagtccctggcttctattcaaaagattgtaatatgttagtatacaattcaaaagtagttttaaagattaatcttgctcaaacaagtattcataaagtttatgtttttttcctccatcattctaatttttagaattctacttttggaagtgtagtaagttttaattttctgtcagcaagtttgagaaattatcacttggtatattcactattggtaacataaaggtttattgagcaaattaatagggcaaaatgggtttatgaacagattttggaaaatgttttatataggtgagtagagcattgttctcaatggaatgcatggaccacatttgattacttacgcaagttttcttaaaatatatgtctgcaatcacatgcctcttcctacctccacctctccttcaactctaggcactcagaagccttttaagaaaatagggatggatgtgaggcattcttatatggataaaagcatctcagaagattctgctttgaaccccaacccaatcattcggaaaccctgctgtacattggaatcacttgggaaattttaacaaccaccctgatgttcaaagttatacacaatgctaattaaatcaaaatgtctcatgttaaaaagaaggcagtttttaaagctcttcaggtgattccaacgtgcagcaaagtttgagagctactgcctgatttgaatttaggacaacaagctgctcctatttggtgggaccttgggcaagtcaattttaaacattctttttcttatctgtaaaatggtgttggattcaatgtcatttagatcattggtccttttcagcaggtaacttcacattgtgtgattttaaaattattttagagattaaaaacttcttgaagcactatagacatagccatcttagatactaatgttacaggcttttaaaaacatgctaatattatataaacctattgttaaattcagatttgccttccctcaattatttgagcctcattttagatgctgtgggcacatggaaaaacataacttatgtttcctaatacacagtgtctgtagacaacttaagaatacagtaacatatatctgaagagttttacttgttcataaatatttcacttaaactaattgaaagtacctgcccttaatattatactgtgtagtgctatgctgcattatcgttagcactgcttattttcagaaagctatcactgattttgtgtgtacctaggtttactaacatgaattatgcaaaagttattgtaaatgatttaatttggtataaaacacttttatcattaatttttaggaaatcataaaacacggatgggtaggagatagttaattaaatcaactaaagtgcagggcctaacaacttaaaaaaaacactactgtatgtcttaaatttaagcatatgtacacataggtataaattgcatgggatgaaaggttttgtgggtagaagagcatctaacagggaaatatgttattatttatatattataatcatcaacagaaacatgtcttctaacagtatattgcctagcattttgatcctcgtatttttgttaaaagacaaaaaactaaaacaagaatatagtgccctaatggtactgttctgaagtagaagatttaaatttcagggccactgggataatttcttcctccccccttttaaaaaaagtttttagacccaacaaatgataaaatccattgttatgattttttctctttccgtagtgtggccttagcaatatattatcacatgaagaaaaggtgagttcttttaaaacctttcttgttattccaactcattactttttataatatcaatctcagtgttagttcatagctatagacaccataagctgtattgtgcctactgaaatattgaagcatattatttgtgttttctttcacccttgagactctttaagtcctaacttattgagaatcccaaagaatctgtgtttatatactgtgtaagaaattaaaattgagatttttaaaaaatctgcttctggcttggattttactacctcagcactattgataactttgagctagataacgctttgttgtgaggaaataaatgctttgttggtgcattacaggaagtttagcagcattgatggcctttacccactagatgtcagtagtaagcaataacccaggttgtgacaacaaaaatattttctgaaaactatatcgttaacataaatagcattttttaaagaaaaataacttctctacaataaaaagttgagtaaaaagtgtgtcatgcattgatattattgcaaacctctaaagtttggcataatagaagacagatggattcccttcacaatatttttagagaagcaataagatgatcaagctttttgcaaatatatagttactaaaaggtgtatctttaatgtttttagataattgtgagtgttctttaatactacctcaaaactcccctgtaactagtttcttagttacaggggaattttgcatatcaatacatttattccatcaatactcactgatttttcttgtgcagtaaatgggtctttcccccatgcttgcttgtataagagtatgcattggttatttgggaaataatggtttatgttttgttgtgtcaaaaactcacttttgttagtatcaccatgtcttattaagagctctttaagtattgagaagctgtcgagtttacggtaggagtgtgttttccaaagttctgggttttagcctgaaagcttgactattatcattgagaacagttattctctttttttgtttaacttttatattaagttcatgggtatatgtgcaggtttgttacataggtgaacttgtgtcatggggatttgttgtacatattatttctctgcccgggtattaagcctagtacccattagttattttttctgatcctcttcctcttctcaccttctaccctccaaaagatttcagtgtgtgttgttcccctctatgtgttaatgtgttcccatcatttagctctcacttaccaatgagaacatgtgatatttggttttctattcttgtgttagtttgctaaggatgatggcctccagctccattcatattcctgcaaaggacatgatcttgttctttttatgactgcatagtattccatggtatatatgtaccacattttctttatacagtctaacattgatgggcatttatgttgatttcatatctttgcttttgtgaatagtgctacagtaagcctatgtgtgcgtgtgactttataatagaatgatttatattcttttaggtatatagccagtaatgggattggtcggttgaatggtaattctgtctgtaggtctttggggaatctccagactgtcttccacaatggttgaactaatttacactttcaccaataggggaacacttatttttcattgatgtaaaaggcttactttattcatttttgagaatgatagtcagttgtacttttaaataaaaacaatattttatttaaaaaagtgattattcagtttacatttaaatcattgtttctttttcttaacacaaccatactgcagtaagaagaagtgcttcttgttaactttccacttattcagagtattaaataggaaggcaaagatttaataataccattaattgttactgcttcatcaaagacattcttaactaaatcaggctctcttttttaactgtaaggggctgtggagaatagaatgacttctagtgtaatttgatcaccttgatttatgctgagaaaccttgatttatgctgaaaaaccagctatttcacccacttttgcttttataaaatcatggcaagtgtcacagtgagaaagcaggcaatgccttcatatccttttaaaaattattttaatttattttttatttttaatcagctttctcaggctgaaatagtatttttatcagaacagttttgactgcttgggcctcatgaaaaatggcctgcatagtattccatggtatatatgtaccacattttttatacagtctaatattgatgggcatttatgttgattccatatctcaggctgaaatagtatttttatcagaacagttttgactgcttgggcctcatgaaaaatggtctaggggatctccagaggtccacagagcacattgcaagaaccattggtttattaaacaggcaaaatgtattagttgtattaacctcttaagttcatcaaagactggcctgtttgaaaataaaaagacagattaagtttttaattcaaactacttaaaataaataaatatatcatgagaatctaatacagagaaaatgatgataaagagaataattatactattatcagtaattgatagtcattattatattattattaatactttttaattagtaattattaagagaaaaagactagggaatctgaatctcattcacatttatttatttattttattttattttatttattttttattttttttgagacggagtctctctctgtcacccaggctggagtgcagtggcactaccttggctcactgcaacctctgcctcctgggttcaagcgattctcctgtctcagcctcctgagtagctgggactacaggcatgtgccatcatgcccagccaatttttttttttttttttttgtatttgttgtagagacggtgtttcactatgttggctaggatggtctcgatctcctgacctcgtgatctgcctgccttggcctcccaaagtgctggaattacaggcatgagccactgcgcccggccatattcacatttactaaagttctaaagactttattgcccattactactgctttctaaaacattcttgtgttccaatgtcaggttagaggagtgaaaatacaacaggttcattaccatggcctgttagggagggtcagtacttactggcaattctgactggttactgtaataaaagacttcataggacttgatgtgctgagtaagaagagtccaggagaccctctgaaggtcaggctccgggagaaggatttgtaaaacagtttgccttggtgaagcaaaacagcaaaacacacaggaggcattattttactaaacagatatgtttagtaaatatattaatcatttctgaattaatttcttaaatgcacatttttactttatagagatgcagataaatccctcgatatgtttgacgagcaattacatccactcactgtatcacttttattgaggccgtatttttctcatagacttgtgtttgtttcacactgaagtcaaagacatttttaagtattcttccccatgccatgttgcatctaatcgtcttatttaagaactgttataaaaaggatgtgctggaataagaaatgacctgcagctctggttaattagtgagctaatgagagtaaatatataatccaaataacagaaaatgtatcttttaaaaagataattgtcagtagcatcaaacaataaacatttttgtaaatgcctttaacacatatacatgatttctgtgaatagaaataaaaaacaatgtaaatttaaataaatggtgtacaaattaaaagtgtacttcctcaggtacataatagccacatgtggctagtgaccgttgtattgaatagtgcaaccttagagccttatggctacagaaaactaaatgtgttttttcaaagtttgttgcagaggagaatgaattattgtcagtaagtaagactttaaagcctaaaagtagtttacatttttatagaattctatgggaaaaagagtagaaaggaacataaaaattttctgagcttgagcccatttttttcactgaatgttgatgactattgaatcattatagtatcttaagattccactgttcgtattttagaaactaaaagacatctccccaatccaaattgttctaagtgacacacaggcacaagtatgaatattgctgtcttaagaatacttcatttttttttccaacggatacttacatcacatcctttcttctttcagcaagaaaagatgccaaaggaatactttgagtatgttcctgaacacaagtttatttacagatttgtccatgttctttttaaagccacaaacctaacagctgaatttgcaatagtaactttggtaagatatttcttatttataaagcatttttagaagttggtacttgtacacagggtatggtgctgtttttaaataaaagttggcttctgggctgggagtggtggctcacacctgtaacttcaacactttgcggggaggctgaggcgggtagatcacctgaggtcaggagtttgaaaccagcctggccaacatggcgaaaacccaactctactaaaattataaaaattagccaggtgtgatgggggatgcctgtaatcccagctaatcaggaggctgaggcaggagaattgcttgaatccgggaggcagaggttgcaatgaaccaagatctccccattgcactccagcctgggtgacacagcaaaactctgcctaaaaaataaaataaaataaaaaagtttgcttctgaaattattatacaaactttaagagaaacttatgaaagcaaagtaaatacacacattcgagttgtatcatcattacagcttaaaatgttgccattgcgtttttcataatagaaccattgctattaaaagcagcgggagagatttctgatttcccccccacacatcagtgcatatgaagtgtacacacatgcaaggcaggcggaggtgttgggatggggagcagtaaggagacggattccagtggagctctgagctgagtcccaggctgcattcctcaggcagttctcatgcaggctgtgattgacagctgctgccgtgtcgtctttgttccttgggccatgagtcttaatctacccctactgatcacttgtgcctgcttatgaaattgcccaggaatgtggttccagtaggcctgggacacaagctttgctcgttagtcttccaagccatagctgtttccttacatttacatcatccctacagaattcctattgtaaaaatgttaataataaattctattcaaattgttgaaattgttttacccctcttcacagccaacctatagaggaaagtcaactgcatggctgggaaggaaagaatacttaggtcaatacttacttatttaccattcaattagagtttaggagagaaggcttctgatgtgcacttgagtcaaagccctcaatgggtgctggaccagacacaggccttttcgaggagctgcaagtcatttggaactctcagcacatgctggagggaagcaggagtggtgcttccagatttagacagatagatgatgctggggggaaagctggattggaaaagggagagttttgtactcaggctaaactagatgtgccttttagatagcagagtagcagtgtctagtcatcatttggatatatgggactagagcatgaatttgtggtagagatgcagagtgaagagtaatagcagctgttcaaatgcagagtaagtgtgtagaataaaattggacaagccaggcatggtgggttcatacttttagtcccagctacttgggaggctgagctgggggggattacttgagcccagtagtttgagtccagcctaggccacatggtgagaacccatatcttgagaaaagaaaacataaagccaggtgtggtggttcgcccttataatcccagcactgtgggaggccacgacaagaggattgcttgagcttaggagttctagaatagacttggcaataaggtgaggccccatctctacaaaaaaagaaagaaattagccagccattatggcacatgcctgtggccccaggtacatggtagactgaggcagggagattacttgagccaggaggtggagactgcagtgaatcatgatcatgccactgcactgcagctcgggcaacaaagttagaccctgtcttaaaaaaggtaaagaaaattgagagacgataggtctgtaaggacttatagtgagtaaaggacaggcccccagaggagtagctgctagaatgggaggaggaaaagcaggaaaggataataaaagagttaaaagatgctgtggtcacagtgctgaatgctgccgagaagtgactcattccataaacactcactggatactgactctgtgtcactcttctaagtgctggggtagaagggaggacaggttgaatacagttcttgcctttatgagcttatgttctagtgagacacaagtagtttttcaggtagtgtcaaatagcaggaagaggaagctggataaagggattcagagtgtcggggtgctcagtactttagatagaatgataaggaagagtctctctagagagccaacatttgaacagtgacctgcccaaagcaacgaagggaaggagtgctggcattacaggcagcagagacaggaatgtgtttcacatgtgttcacagaacaaacagcaaggtgaccagtgtggtcagagtgaggaataagggaagcagtggagataaggccacacaggcagggccacagctcacagggccttttggcttcaggccataggaagatgttaaggttttattccagtttgataggggactcatgtagatcttgagcagggaagtgagtgctgttaataaagaggttatggtgactgctttggggaaagtaggccatggttgggaggcagattggaggcagagaagagggctaaaaagcaattagagtgatacaggtgagcaatgagagattgtggctcataatcaacccaggcagactaccagtgaaggcagacataacaggcattggagacattgcagaagggtaactcaaatgcaggtatttggccccagcagctaggcagatggcaatgtcctgtacaagattagaaaaggcttggggggttgactgttgggctggagacttccagtttgtaagtgtgaaggcaccagaaacctaggcaagagaagtgttggaagagtaatgtcagtggggcaggcagtgtacattaaggagagatggaagatgaggagctggcatgagggcatggtgctgtgagcaccaatgagatgacacagctggaggagtagtggggagtgagatgggaacaaaggaaacacagttagattggggaaaatcgctagtagagaggcacaaaatcttcaaaaagaggtgattgtaggaacagtgttctgcaaaagtggaatgggatcaactgcactgagaaaagttggcatcagtggggaaaacatttctacatctgagctgatgatcataaccttcagacaagaaataaactcgtataaaataaactttttccctttgttttgacataaagagttcaggtagctcgcagacatactcttctgcagagcaccctctgaggtaacacctcctcacagctcacctttaatctttactcagctgttcactttgcccaattctttgtaaagcagatgtttgataaatgtaaactatcaaacatgtgctaattcatgagattgtctcacaaactactcggcaggcttagaggaatcccagggatgcagaaactggcagctgtttccacctttaaaccaacagaattgactaagttgcaggatgtaagagagaataaattttcatgaagtgatcatgaagatgggaaaataggggctgagaggagggccattcttttatacacatgtgttttttatcaagcaactgaatactgagaatgttttacaacccctgagacctgcacctgccatgctgctctgcacagcggccactgggaggctctcttgaccagcagttttttaagctagcaccacaaaagggttagtgtttgtgaaaaggagattaacatttgctcactatcacatgggttttatatattcaagcttgacatgcctgtagaatttctatctacctcccagctaagtatgagacattacatttggtaggcacttgagtatttcctgaacaacttcaatccacactggtccttagtgtgtgctgccttttatgagtgtgaagatgatgacactgcctctcttcatggtggccttggctgacatatgcaggcattcttgtcaccgaaattgggctggaaattcccataggcagagtaggcagcagaagtatctgacctatgattgtaatgtggtctcttgctttgcctgaccaagcaaagtatgtagagcataagaataaaagacactttctggtcaaaaccagaagaaatctgtcattcaaaagagttcttatcagagcacttaaagtgaactaaatcaaaggccagtgctctattttgcatatttacatagaaagactcttaagttatgtggagatagacctttgcccgaccaactggaagagattgtcatgggagccattcttctcacctccaaagtttggaaagatgtgactatatggaatagggaatactgcaggctctttgtgaacactagcattaaagacatgtgagtttctaaggtttttgtgaactttctaaccattttcattaccttatttgctcccataaatgtaacactttaagacatatttttaaaggctacagtgtgcagataaggaaaacacataaaaccacatacttctttatatccagctttagtataaaagttcatatcttttcactgttaatgggtaggtcttggtgagttactgttgtaataatctgctctgctcatacatggaaaagtatttttctggtggtttttggcaaatacttcacaagtgcactaccagaacaccatagcacagtaaatatctttatggctttttagaagctgtctgtaagttccagtctctttttaagggacacatgtctggctgttgaaataattggccactcttaaggtctagggcctctggactatggagaagttatagcctcagcctcagtcacacattgtgtatttgcttttgctgatgttttctcccttatatttaaatgtctgtttttttatagaaaacttgagatgcagaatagccacagatccctgtgccctccccattaggagtgttgcatgtgtttagaaattgggttgatgagtttgctgctccagtgtttccttgaggcagtatgcaaaaaattgcccaggcatcacacaatgcccaccacactcaagaggctcctggggcactcatacaaccacagcagcaatctgtgggacttgagttaccaaggagagtgcgagaaatcttgctgagtcatggggttgctcatagacggtgccaacatgatactgaaacatgggcttcatgggggctttcttccagtctggccttacgactgttgtaaagggaagagccttggagcttgtaagcagggtgagctagggaagcatttccaccaaacactctagtaatgtccacaggacagtgagaatagctatatgggtgacacttaagaaaatataaagggacacctgttgctgtcgttgagcagcatatgaagaacaatatcatgacaggcagtggcaagagtttgtttttttacatttgcccgttactccagataagactgccatccagaatgtatgtgatcacaaaagtagagcttgatggctgattagaagtctctgccaattgttctcctcataagaataacaaattgagtaactatctaaataaaaaacacctttattagaactaaaaatagctaaataattatagtacctggtttaaactttgtatcactgaaaaaggcagtgaacacggtaggaaagacagtcttgagttgctgatgccagccctcccttatgtcctagcattggccatgtgacaagaagagaatctgcatgcttggggaagggagagcacagcagtgtgagactttgcattgaactcagtgctgcgttgtcatagcagaaagcaaaactgggctgaactcagccagtgcccacccacggatggaacatttctagccctagcctgaagggaatcacccatcccagtggctgaaaactgagttgtggaaagcctcactgctgtgggataaagtattctggggtccttaataaacttgaaagactgtctaggccacaaggaccgcaactcttaggcaagtctgagtgttgtgctgggcttggagccggtgtatttggggggcatgtgacctagagagacagcagatggggcagcccagggagtgctgtaccacccctccttcaatcttaggcagtgtagctcacagctctgacagagacctctttcttctgcttgagaagagtaaagagtaaagaggactttgtcttgcaacttggatactagctcagccacagtaggagagggcactggtcagagtcatgaggctcccattttgggtcctagcttttggataatacctctagacaaaccctgggccagaagggaacctgctgccttgaagggaaggaatcagtaagggcaggattcatcactttctgactaaagagctcttggaccctgaataatcagcagtggtaagcaggtagtacatgtcatgggtctttagtgagcctcagagatctgctggcttcatgtgtgacccagcacattccaaactgtggtggttatgaggagagacaacttctgcttgagaaaatctgagggaagagtacagaggactttgtcttgagcttagacaccagagcagccacagtggagaaaagcaccaagtgggctgttggggtccctgattcaggccttggctcttggatggcatctctgggctttccctgggccagaagggagcccactgctctgacgagtgagttccaggccaggcagcattcaccacaagctgactgagagcccttgggccttagtgaacatcagtggtgacctggcagtacaccccaggggattgtgatgctggtgaacatggggacagactactctgcctgggtaatggggaaggaagagtggaaaggtgtttgatggttttagtgccagctcagtcacagtaaaacagagcaccaggtggatttctaaggtttataaccccagccctagcccccagacagcacctctgaacccatccaggggccgggggaacttactacacttaagtgaaggacagaaggttctctggcttcactacctgctaattgtagagccttggggcttactgcaaaatagctggcagccagggagttgttacagtagaggccttgggcagtaacagtgctgtgtgggcttcagatcagacccagtgctgtcctaggtgtagtggccacaggggtgcttgtatcactcatcttcgaactccagaaagctcagcacagagagactctttttgtttgggggaaagtaagagaagaaatgagtctctggctgctaatgcagagaattcttccagatcaaatccgagatcactaatgtgctacctctacatatctgcaagaaccaatgacattcttcatagacatagaaatagaaaagacaatcctaaaatttatatggaaccacgaaagacacagaatattcaaagctattctcaggaaaaaacgaaaaaaacaaaacagaaggagtcacattgtttgaatagaaatgatactctacaactatagtaaccagaacagcatggcactggcatgagaacagacacatagaccaatgagacagaagagaaaactcagaaacaaatccataagtccacagtgaactcactttcaacaaagatgccaataatacacaatggggaaaggatggtgtcttcaataaatggtgctggggaaactggatatccatatgcagaagaatgaaactagtttttctcatcttatacaaaaatcaaatcaaaatgcattgaagatttaaatttaagacctcaaactatgaaactaaaataagagattaggaatattcttgaagacattggactggaaaaagattttttaatactccataagcacaggcagccaaaacaaaaatgggcaaatgaagtcacatcaagttaaaaagcttatgcacagcaaaggaaacaacaaagtgaagagacaacccacagactgggaaaagatatttgcaaactatctggattaattaccagaatatatgagaagtgcaaacaactctgtaggaaaaaaactaataatctgatttaaaaatgggcaaaagatctgaataaacatttctcaaaagaagacacattagctgctgatggaaaatgcttctggttcctgctacaagggaggcctggatgggaaaattacctgtgctcaggaggtcaaggctgtggtgagctgtgattgtgccactctccaacctgggtaatagggtgaggatctgtttcaaaactttaaaatatacatacaaatggcaaacagatatacgaaaagatactcaacattattaatcatcagaaattcaaaccaacactacagtgagacatccatctcacctcacttagaattacttttatccaaaagacacgcaataacaaacactggataggatatggggaaaagggaacagtcgtacactgttagtgggaatgtaaattagtacaacccctatggagaacagtttgggggtcttcaaaactaaaaatagagctacaatatgatccagcaatcccactgctggctatatacacaaaagaatggaactcagtatatcagagataagagatacctgcactctcatgtatgttgcagcactatttacaatagctaagatttagaagcatcccgagtgtccatcaacagatgagtggataaagaaaaggtacatgtacacaatggaatactattcagccttaaaaaataatgagattctgttatttgcaataacaacatggatggaaatggagtataatgaaatggagtattaactcattatgttaagtgaaataacccaggcacagaaagacaaacttcccatgttatcactttttatgggagctaaatgttgaaacaattttacttgtgcagatagagagtagaagaattgttaccagaggctggtaaaggtagtatgggggatggggagtaagaagtaattgttaatgggtacaaaaatgtatttagaataagatctagtatttgatagcgcaacagggtgactatagtcagtaattatttaattgtacatttaataataatgaaaagattataattagattatttgtaacacaaaggacaaatgtgtgatggatacttcatttaccttggtaggattagtacacatcgttggcctgtatcaaaatatcctatacaccctatgaatatataaagctataatgtatgcacaatttttaaaaaagactatcattcgtccaggctcggtggcttacgcctgtaatcccagcactttgggaggccgaggcaggcggatcatggggtcaggagatcgagaccatcctggctaacacagtcaaatcccatctctactaaaaatacaaaaaattagccgggcatggtggtggacacctgtagtcccagctgcttgggaggctgaggaaagccgtgaacccaggaggcggagcttgcagtgagccaagatctcaccactgcgctccagcctgggtgacagagcgagacttcatcccccgccccccccccccccccgccaaaaaaaggctatcattcagaattactacactgtgcataatatacaattgaagtgaggatgttgtgactaacaaaagactagtgactgttggttgctgttgaaatggctgttggtgaaaatgaccactttgctgatagtataaacgagtgatgatggtgatgttgctagtagccattttagcaaaagatgtgacagaaaattaatttgaaacagaagtactttgaaagttgcagacactaaactgactttgatcactactgtcatcagtctgcagactgatttctcaaaggaaacaaaatttgtcattatgaacacttagctttgctataattgcagctaaattattctcaaaacttgcaactaagctggctgagctctagttgtagttacaaggtcagggaatgtgcaagttctcacagacgtgagctccaggggcagtggtgtcagaggcctgctgtaagaaacccagttctacacaatgctgtttgtgaatgtggaagcatcagaagctatgctctgcaaaggctgcttttgtttatgatctttggaaactggaaagcattacaacaaagtgttgaatatacatttaccttgtctccctgctgttgattatgcataataatcttgttttgactgtaaattggaccatttaaaaatgagtgtctattgggtttttcttaaaactcttcaacatcttcatgtcttgttggaatatattttccttcaaaatatcagttaaactgagcagctgctcttaagaaaatgtgctgtgcctgtaaagggtatgctgttcagtcatttaaaaaaaataaacaaaaaaaactaagaagatccatatcctgtaggcctatgcttatcttcagtaactaaacctctattaataggtgtaataatttaataaaatattgtatttctacacagtcaaaatgtgttcatggaaaaatgtgagataatataaaacaaataaatacaaaagtcctgattagctgattattaaaacattgtctgatttacatttctatagccttacggtcatatgaacaggaaattgatgttggaaatagtttcagatgggttttcagttaaacagatgagaaaactacatctctgctcatattttaactgctcttccagagaacatcaaacatttgttgacttagccagtggataagatattaaaactttaaaaccaagaaactaaatatgttgttcaggtattgattgtttttatacaattaagtctttacagggattactgtgaaagtggttctatattattttatattcatttgtttaaacatttaacaagaagccaggtacactggctcacacctataattccagcacttttggaggccaaggtaagaggatcacttgagcacagaagtttgagaccagcttgggcaacaaagaccctgtctttaattgaatttttcctttaaattagcccagctcagtggcatgagcctgtagtcgcagtgacttgaaaggcttaggtaaatggattgcttgagcccgggagtttgaggctggtgttagctaggatcatgtcactgcactttagcctaagtgacagactgagaccctgtttcttaacaaaaaaaaaaaataggcaagggcagctctatgatcatgtgacagaaggctgttctcagcctttatctctcccactgccttcaactcatcccccacattctgttctgtctgtgggtgacagaagctgagcaccttagggttttatttccagctcaggagaaacactgagtaagtccagtgccctgccagaagtcatatcataaagtgagtttagtctagccaagatgtctctctttaatctctctgccttccagtgtttaaagagtattcctgtcctgtctagtgacagtttctcaccttcataatttcaaggtgagtagaaactggcgttatgccctttgacatagcctcatgcactgaggcagaggggagggattccctttcccatcaaatgtagcttatgtatgtatttgagaccaatccttgttgttttggagtttttcctcctcagaaataacagggtggctctccatggatccatttgttgccatggtgttgtacccatggcttttgttggtgttttttgacttcagtaagcctctttttgttatccttgtgaaaaagtctgcaagttcttcagagctaataaatggcattcatcattcctgtcatctgatcactgttgtggggccttgtgagtgagcatggagtctgagctgtgcacctgcactaagggaactctcaagaatgagccccgagtcagcagcacatatgcatgagaggtggtcacctttctccccatcccagagtcagggtgctggatgcagaagggactgcaagcaactgtgccttgtttggacattagcataggaatccaactgggtagcctttatttgtttcaaaacagaatttagagacatcctagtagctcagaattatatttttaaatgaatagaaataaattttattaaatgacaacagaaaaaaaccactacatgtttagtacatgaactaaacttatgtagtattgtttgaagggtatctacaaaattctcaccctaatgttttcttgcaaaagaagtgaaaatataaagtgaagagacattctgtaacaaggaaccactgagaaacacaaaatatttaaaagtcatataaaatttatgtgcatttttgaggattataaaataatcagttggcatcagacttttcattttagcaacatttatagaattattttctagtgggagttttcacacaacttttgaaaaatatgttaaaattgaaaactttcttgtattttgtaaactactgaggttccaattcagggtgctttttttatatttataaggtccatctctacagcatgtaatatcatgggtctttgagtgaatatcaactaaaggcattctgacattctgtacattcataggttttacctcagaaatgagttttttcttgtcttcaggtggaactggaacgagtaaaacactaccatatgtttgtatttataaggcttttcttcattgaacccttttatgttttcaaagagaaatgacaaaaaccgaaggctttaccatgtttcttaaaattttgtggtttttctccattttaaatcctaaaatgtctttaaaagcaagtgggaaaatcaagtttattatcacatgttttacatttatgcttttcccccagtatgagtttttctaagttttcaaagagaactgagaaaattccaggctttcccatatttattacataatagggtttctctctagtgtgtgctttttcatgtgttcttaaagaactagaacttataattgctttatcacatttcttacatcagaataatgtttttgaagatagcccagtggactaacattgtcccatgttggttttcttgtgtttctcctcccacaggaatgagcttgaaagacagtttttgcagctaattgactataacgtcgaagtttctggaagtgtttatgccaagtactattttgatcttcgatccttggcaaaggacaatagcttgcattttccagtttatcttctcaacaaagaaagggcacagaacctggaagtaaggcgataaagtcactaaggggggttttctgtcaaccaccaaagccaacatctgtgactagattagattaagtagtgatgagaaaaatgaaaagctccaaaattaacttacatactgaagagcttatttcctgtatcatttatggtttatacaagaatccacattatttaaatattatagatctcttctgtgaccataattcagaatatttttaaccaaatttaattcagtcttagtggtattctttttgaatctttgccctttcaagtaagcatacatgaataatttcttgcaattctattttaaatgatatctgcatatgtaatgcacttaccacttttgcctgttttttattacttagtttgcaaatttatgtcattttttattgtatatattacagtgcagccagttccataaatttgttaggcaaagcattagtgcttaagccaagagacctacacttagtctgtataaggtatgagcgtctcaggtagtgatgcaagaagtacatgtgttttactggaaatggtaacttttggggggcaaagcaatatttatggtttgtgacttctggtttcagttgtgagcaaagttgcaactgaaatggatgcatatttataattagtactttctgtggtaccttagaagtactttagaataacataccttctaccataattaatgtgccaggttctgccttttgctgctttagtcgttcgacctctttgatgttccagtgcactcctgcacacatctgcttcattcaaatttgctttgaggatataataactactgcagatggggtagactctgaatagattaataaactataaattttcctttgctccagcaatctaatcatagcccttaaaggagattaccttagtgaggtggcagggagtagcatccccggaacctggcagtgcgaacctcagccaaaggagctgtaactgtgaactatctaaaggagcgtctgcatgtctggcttatcatcaatggtgcttgttaaaaggctggagccctttttaaaattgtacctcttttctgtttcatttactttcttaggctatttcaaggatggaagacgccaaaatcttttatagtgaaggtccttcagcgctgataatttcattaatcttcagcgctctaaagccattaactcttgaaggaagaaatgaggggctatatcatgtgaacccctcatcaaaaaagttcggaaaatattacctctcatgctcaacaactagaaaagttagtattttcaaaagaagaaaaatctcaaagttgagaggcttgtgggcaactaggattgcactccacaggaaaaaaatgggatcgttgcagtgcaacaactctcgtacactcttctgtctttttaaacgtaaacaggtataaaaactactccaaagtgaagacttcttgcccatacatagatatctttttctgtgtgtggactaatagctgtgaactatgtaagggttttaaaacaatagtttaaatttttagatttcagacataattttctgtttcttttctatttttcttttcccccaatattgctgcagacacatttaaaataaatgcagtattactattaaaacatgggactgtaataactcatgaagccactagaagcagaccgctcattttcaggtgttgaagggttctacctgcctacttttaccatcggagctgctcgtcactggcaatcattttaaacaaaagctgatggagttcatttgccattcatatcttttgtaagcattacttgctagcattttagcatgtttggggtcacaaaagaaaaactattagttattggttacctacttgtattagggtccatggtatgtttcttataaactataatgatccttttgtgtgtgtgtgtgaattttatttatttatttacttattttttatttgctgataaattttcttatttgttaaataaatgtattgagagatattttcataatgccaaaccacatgatgatccagtggtgatataaaaataataataagtgatgtgatctgaaagtttcagggcagattctagttttaatgtagtgtgcttagaccctccagtgcacggcagcttatgtatatatgctataaacctttataaaataccgttcaaaagtttcatagtatttattttttcttttttataaaagatggggtcttactatgttgcccaggctagagtgtaatggctattcagaggcacaatcatgactccacagcctggaaattctggcctcaagcaatcctcccatgtcagcctaccaagtagctaggactataggtgtagtaccaccacctctggttttattttgcaaaaactgaatattaagcttttaactttttgtttcagtcaatatctgctgtctccaagaaacgctgaaacaaaaaattaaaagcttaatatttaggagctgggcatgcctgtagttccagctactcatgagtcttaagtgggagaatcacttgaggcctagcattggaggcagcagtgctctatgattgtgcctgtaaatagccattgcactacagccttggcaacatagtgagaccctatgcctttaaagaattgcaaaactaaatacatgtataagcaatataataaactttccaatgatgttttgtaaatgtttgtagcactgatacttgtacaagtatcaaagcttaaaattacactaagacttttggaattcttgtatttttataaagtgccctcttctcttttaaagtagttcttagcagggctgttatctacgttgatcacctaaaattattttccctacatgtggtaaaggaagaatatgatcagtgttaatttacatgtaacagattagaaggaattggaccctaatagtagcaggtgattaaacattttattatcccacctgttagcctggctacaggtattatatttcatgtcctgctgtttacaaaaaagaacttccataaaccttagaaatcttacttcctcaaaaattattgtttatggagtttagagcttggagatttaagtatttattgcagttttattttcaaatgataaatgctatctataatttatgtggtttttatttctcatgtttacattaaaataaaacctgataaactgttttaattaaaatgtgaccaatgtgttcataacacttgtaattacattatgttacatatctgcctaacttacatggtttaagtcagtcttgatatgtccgaagacattttgataagttgctttcaccgttcataagttggtttgattcatgcctctgtttaagatgtaatatttgttttctctctcttaagctcttttcaaagtgaagataatttgttacacttaaaatcactgtccagccacagtacttagtggcatagtgcattagatggcatctttgaataaatggttattgtgcctgtgagaaaaaagcataatatgcttattaggatataaaattatgtaaatatacaaaagagaaaggatttccagaaatagtacagaattagaacaagaggtgtttgaagtattcaattacacagaaaaaaaattggaagtacaaaaagtagaattagtgttgctgtacagagggtgacaaaccacataatttgactttcgcacactgttttcaagcttacattttagttaaaaatatatcaaatcagttaggttgttttttagaactaagagtctagccactcagcttcagtgattctcactaaatctttaattctttagtacctaaggtaaaattttaaataacttatcaccttatcttgataaagtgctgactaaaatcaatgatctcatttaacttaaaagaaaatatttataaattactgtttataagaaagtttgcagcatataatatgacaataagcagaaatcctgacatatatgagtggtcaaaggttcaaaaaacagtttgggagagaagaactggacatgaatttgtgacttcaggagtaagtcagtagaataaaaatcagtaacattgctctcccctttggcttgaattctagaaggcaacacagtcattttgataattgggaaattgggtcaacttaggataagaatataaatgtcactgaaagtgggtaggttttctgacaaatgttatgtgagaatgtgaggtggcagggccccagaacctggcagtgtgaacctcagccaaagtagctggaactgtgaactatctaaaagagtctgcatgtgtggcttatcatccgtgctgagcatggaaaccaagctgctagtacagtggcaactatggcagttttcttatagtttgatatctaggaaatatttcaactgttgtaatacagccaccagtgaaattttaactccagtatattgtgaactgaacttttacatcattacaaggaaaagacaaagatttgaaatatacatttgaaccaagtgaaattgccattcttataagtcaaaaatggttgtctaatggcaatttcatgtggttcaccctaaggtgactgcttagagctcagtgtttctggagaaatcttatcccggccctttccttcacatttcctctttatgtaaccaatatgcccacatgttattaaaatccaacaacactaaatcccaattttatcacaattcaaggttcatttttgacctagtttttttacatttctaaatactctatttcttgatttaaaaaaaaatgccaaagccaattttaaccaaaaatcaaatcattctttgttctgtattcagctcatgcagtgtttctggaaactagtttagctgcagtatgcaagttagcttgaatttttcgtcagcaaaggcttctccctaagcacatttaagatgactgtggcctgactgttccttcacacagcattgttgaatatgaaactacttggaaaatgatttcacagacggcagagaaatctcccaggtaagtgctagtttctacgcaggatctgtagagtacgcccagaatctatcaagttaaggattaaacttaaatctactcaacagccacttccagacctgattgggcctgacattgtgccagcaggcaaggcaaaagatgtaggagcccttcagtgaagtctgcacccctataacacaagtttctaaggcaatttccattcaactattttaaatgtgttcggcaagtgtcagaacatgcacttaatgtgaaataaattttaagaatatcagcttgtggtttaggatctccagggtacaagaagaaaaactaactgggaaagtgaaatagaataaaaattatgagaatcttgagtccaatgaaataacgttaatattctttaaagaggaacaggttaggtgattcttacaactgctgtaagggagctaagcaattttaatgtgattaggaaaattcagtgatagtaccagaatttaaggtctttaataaaataccagtagtatcttcttcaaaagacctccactgattctcaaattaggctgctaccttcttgtaagaaaaatcgctttgtcttttccaccttgtctattctacaaactcttacctgtcagcccaagctggtggctcctgtgtctccttggtgtgataactgactcttccacaggtagagcttcaagtgtttttccaccttctctttcaccagctgcttcacccaagacccttaggaccctctttaaacaaaattcttccagcgttatccttgctttttctgcaatgtttgatgttggtcattatgacccactgccaaagcattattagcaccggattccagagcatgcaggctgtatgtggcttacagactaactgaccccttgtaactccctttcatcacttatgtgaatcctgtgttctccaaagcagctcttcccaacttgctgcacttacctattctcctgacctactcacaaccctcgtcatgtattctcaatctagactgaggttgaggttgcacccccaccttccaaaaccaactatttcctctggcatgaaattccttgttctgaaggtaaccccctcccatctaatggaaagcattccacttctaactctaaaattaaccttttatttacacctgctccatcaattatcttccttaaaattgcacttacctccccaacttggggaggtagcaattttggtttggttctctgaatgtctgagtgttttctcaaaatgtggtcctcagctcccctgcctctcttccactgaaagagcttatgaaaaatgaagattttctaagtccagtgtggtatcctggatttgatcctggaacagataaagaacttgagtgggaaatctgatgacgtctggagttaagagtaatgtgtcaacactgactttagttttaacaaatgtgccatgttaataagatgttcggatgttcgcattaggggaaaactggcaatggtattcagaaactctgagttattttggcgactttttgtaaatttacttttataaaatggcctcttgggccccagaactactgagtctcaatgcctggggctgaggcctgggaatctaaatttttaagaggcaacctaaatgattgttatacagcctcaaattttaaatcctcctcttctcaattccctttaattccatgtctgaacagttgcttctcccttgtttcacctacctaacttaacctgagttaatctgttaaaccttctgaattctatgatgtaagtactattattatctgttttttccctgatgagaaagctgaaatagtaggagctgaggcatccaggatcacactgctcagaaaaggtggagctgggacttgaattcccaatcagcccggctcccaagtctatgttcataaccactctccatcaaccctatttctatccacagtgagctaaaaagctctgtaggtaaagcactaaaagcagcattattgccaataatattatcctaggcctacctatttctgtaactttctaagtccaacaaacagtctttctgcttcagcatacagactttgcctcccctgcttttccactggggatgaatgagcaatgagaaagcatggggaagatgtgctgactgtaaagtcctgaacatggaagggacagttgctcttctcttaggattcagctcaactattatattttctaatctgcctctcccaactgccttatgtaccaattgaatgaagtgacagcacccacccatgtcacccaccttgacatagaattccatgctcccatattgctaattcacctcttcctggatttatgttgcctcccccaaacattttaatctcctaattactcacatagttgtgtctcccacacacttatgtctgggatcattgatggagaatgtggatataccaggcattaaaatgaggtggcatttggtagattggtggctaatctttattttgccaaagagaaatcagcagaaggtggtctgacagtactctcaggctcactaagcatccttctagattttaagggagaaatctactttcaatcagtttctacgttctcatctgggctccctgactttagagtttgacagcaaattatggatacaactgctgaattaaaaagctgtagaagtttctgtcctccagccagacacacaaaagagcaccatgtctattcagatgatttcagtgtaaatgaagggctcataaaatagaaggcaatctcaggaaataactttttttcatgtccctctttatttcttcaaatgaataattaagattggcaggagaaacctaggaagtattttcgattaaaacatgttttaattagttctgcttctggtgattagaatttgcttaattttacttgtttataaaatttttctgcttatatttaagtacatctgaaaaatctgattataaagttaaaatctacatctctccccagatattctttaaaagaagtgtatttcttcatagaaacatgacgagaaaaagacttccatggcatctttttattttcttcactattgctttaatgcattttaaaattaatctatattaattgagaataaaggaacaaaaagactttttgtcataactagtctttatatttgatttttaaaaaagctcaaactgttattttttccttactacaaacagaatacatacaaaaatttttgcaataacagtatcaactaattaaacattttgagactaacataaccacatagtcattctactgactccgaggaacaaaaaattcctaatcaagatgctctgggttttgttgttgttgttattgttagtattcagatttataattatcatctgccagtaaaaatttaagtgttcaaagttgattatctacaaatacatcactggctctgacatgtaagttctggagttagcatgacagtgactacactgcatgggatgggtacgatacatgtatagaaatcataaagagcattgaatgcctggacttgaaccgttgacttggtatgtgcttcatttggctcactaataaatccacctgtaccaacctcatatcaaaagtcacaaaatatttcatctatatcatatatactctgtagatacacacccatctacaaagcatatatactatacattcagtttttagaaacatgaagtcatattgttttatggttttgttttattttgttttgtttttgagacagggtcttgctctgtcacccaggctggagtgcagtggcatgatcatggctcactgcagccttgacctcccagggtcaaacaatcctcttatctcagcgtcccaagtagctttgactacaggtgcacaccaccatgcccagctaattttttttatttttagtagagacagggtttcgctatgttgcttaggctatgaagtcacattgttgtaaaatgatataccacagatgaacattaatctggctaaaataaatattgtaattgtcatcaagctactagaaacttttgggagttttgagtcaggtgagttacttcccacctgcctaccctcatgcttctgtaatgtcttggtagtctgttcatacaaaaccatttccccttaatgcagttaagatttcttttccaggatgacctgattgggttttggagaaaaaaggggtcatgcagaagaggcaggcatctctcagccactttccctcacacctgctgagatgagtgctgttttctgtctcattggacacatttgggttagaaagcagttattcaaagttctgtgtctgctactccctttggtctttctgtagagcacaaaagtgaaagaagctcctttggcaagaatagccgttttattaaaatgtaactgcatgtcctagctctaaggtttccattctctactggagagtgcaggtcatggatgctgttattgaggtttggtgtgtgacaaaacaggacgaaacagcctaaagaatgctaactttgaaatagtgccgtgggcatgttatttaaagcttgtacatgcatcagttacaccacacacccaggaccagttcactggcaatgatcacgtgaaaatatgacaaaagtttgcaaacacataccaataaggcaccaagaaaaaatatttccagttaatttcagttaattcccagttaacttcaaaatatgaggttgtaccagactcagctgcttaccacttaaaagccagacatgagaggtgagggttggtggaaggaaaagcaggtttaatcagaggcagcaaaccccaaggatggcaaactagctttctaaaataccatcacagatttttaaatattaccatagggtttttaaagaaaaacttgctatgggagacatgtgggagccgtgtggagtgcagcatctgtgtctttgttgcgatggctgtcagggttaatcacccaactggaggcctggttggtgttatcttgactttggccttaatgtgatggactaattgtgactccccctaagcaggagaatttcacagggactccatgccttacttgttctaagattaccttctgacatttcttaagcaagaacataattagataagcttggagggtactctagagagggaaggaatagaggggtgagagggagaaaaggaagaaaaataagaggatgattaaaaagaatttttagaacagtttcccaattacaatgggtgaaattaaaaaaaaaaaaagactcctgaaaatctggtcaactgattcactgagagttcccattactttctttagataacctatttgaattctcatccccttgtctacgaagtgagacattgctgagaatcacgctgtgaaagtgacagccctcaagctgtccatatgaaactccactgtgtctaagtctgtccccacttttacaaagctagctgtaaaggagttgctgtaccaccccataaccttttattttacaagtatttttatgagtaaaactagttttcataatcaaatgcaaattatatggatggaaatgggggtggctgtaaatccagcttctcttccctagggaggctgatggtagacttcagggaagcagatggcctttatctttgtgtctttcagggaatgagggaatagagggatagcagggatgagaattttctttaagtgcctctgaaagttagtctggaactagatcccaaagaccatgatttatactgcctgcccttggggttagcatgttttctaaaactgtcttatttctgagtgaattaattgttgttaggtttagcatgttgccaaaattttttttaaaaatctaaaaataaataaatcagttttatctacttcattccacagtattagggaaccgtgcatcatttctagatttctccacaaagaaaagagggaacacccaaattaggcagcataactgaaggaggcagggcagtctacatacattgtgggaatacatactagacgaggggaaagttcaaggtgaccagagattctcatctgaaaaacagaagaggaactgttgcccagacaggcaatctgtttcaaaatacgagtaaggggcttcttcctcgaagaataaataagataggctaaagttctgtagctatgtgtagtaggttttgttgtggccactgaaattttaattatgattcagaggatgagttgtgtaagagcaggcatatatatacatatatatatatataaatgttaagagcttttgagagtccttaaaactatagtactaactttttccctcaacccccgctgttccccataaaaaatgttcaaattgcctgtggaaagtatacatttatctactcaatatccacaaagtaaaaattgacctaggcttaaacattacttttccaattttggtgtaaattaaatccaaatgcctagactccaggtgtttttccaggtaggtttcctcaaatgttaattgcagtagcaattttatctttctaaatttagcactcactcaatcttggtcattggtattttgcttgctgatgcactgccactctcttgtccagtaatcacctcaaatccttcatgaatgaatgcttaaacaaattttttaaaaaattctaatagcaaagaaatctctgtttgtgtctatgtgtgtgtgtgtatcattatataggctttcaaatatgaatgaaggaatggttgaacagtttagtaaagcaaaccaaattatctaatagcaaagaagttctctgtgtgtgtgtgtgtgtgtgtgtgtatgtgtgtgtgtgtgtgtgtatgtgtgtgtgtgtgtatgtgtgtgctcatcaaaacacaggctttctcagaaggaaagaaacagtgtagtgctagaggtagcactacactacctttgcagcattaacataaacacagaccttaagtctgataagaaacatttacaatgtattctctctgaggcctgcttattgaggcttcctctgcctaataaaaccttggtctctgcaatcccttattggaactcagacattccttactactaataatacctctttcaacaaattgccaatcagaaaatttttaaatctacctaggacctaaaagcaccccctcccccaccactttgactcatcccatccttccagattgaatcaatgttaatcttacatgtattgatggatgtattctgcctcccttgaatgtataaaagcaagctatggcccggcacagtggctcacgcctgtaatcccagcactttgggaggccgaggcaggcagatcacgaggtcaggaaatcgagaccatcctggctaacacggtgaaacccccgtctctactaaaaatacaaaaaatagccagatgtggtggcaggtgcctgtagccagctactcaggaggctgaagcaggagaatggcgtgaacccaggaggcggagcttgcagtgaactgagatggcacaactacactcaagcctgggtgacagagcgagactgtttatcaggccctcccgaagttgttgcatggatgcatcctttaagtctgcagaggtttctgctgccttttgttcggctatgccctgcccccagaggtggagtctacagaggcaggcaggcctccttgagttgtggtgggatacacccagttcaagctcccaggcagctttgtttacctactcaagcctcagcaatggcaggttcccctccctcaggctcgctgccgccttgcagttggatctcagactgctgtgctagcaatgagagaggctccgtggtgcgcatccttaactttggcaaaataaagtttctcaattgattgagacctgtctcagatactttttgctttacaagttggtaaccatagaggattctgagtggaggtgtccctgacctttgacaaatctatcaatgcttggtaccagtttgagctatctccccactccagagaatttttgatttcccaaaatttggtcaagatctgaagtttattttgctgtacaacttcttttctggagttttacttgcttccaaaaagggaagacaagttttctgcttctgtgacaaaaaagtgcaggcaactacttcctggaatttcagctcgctttcaacaaagaaggtgagttgtttcttcctgcttctaggaaaagattaacaaccagctggccttaatttctccttaccattagagtgctcagtaatcatattgttgggtttgtttgttgtcgtggtctttctcccatcatatttgaccaactctacctagtttactcaaatcattcttattctatgaagccagcatcattttggtaataaaaatctgccaaagacatacacacacacacacataaaattcaatgttctgattaacatagacgcaaaaatcctcaacaaaatactagcaaacaaaatccagcaccaaattcaaaagttaattcaccatgattatgtaggctttatatcttggatacaggactggctcaacatatgcaaataaataaacagaatttgccacataaacagaattaaaaacaaaaaatgatcgttttgatagatgcagcaagaacttttgataaatttcaacatcccttatgataaaaaccctcaacaaactaggcgtcaaagaaatatgactcaaactaataagaactttctatggcaaacccacaactaacatcgtactgatgggcaaaagctcaaattatttcttttgataactggaacaagaattcatactctcacaacttcttttaaacatagtgctagaagtctaagctagagcagtcatcaagagaaataaataaaaggcatccaaagtgaaaaaggggaagtcaaattatttctgtttgcagatgactctgtattctgggttctctattctgttccattggtctttgtgtctttttaaaattccagtagcataccgttttgttaactataaccttatagtaaagcttgaaatcaagaagtgtgctgccttctgctttcttctcttcctcaagtttgccctatttggagtcttttgtgacttcatacaaagattgtttttctatatttgtgaaaaattccattggaattttggtaaagattagattcaatctgtagatcactttgggtggtatagacattttaacactaacaagttttcaaatttgtaaacataagatacacaccatttatttatgtttttcttaagatttttatctctgttttatagttttcaatgtacaaatctttcacctcctcggataaatttattcatatgtattctttctgatgctattgtctttggattgttttcttaatttattttggatagtttgttatttgtgtatagaaaaacaagttatgtttgttaatcacgtttacattaatgttttatgtgattattctgtaagtttattgaacttatttattagtcttaatagtttttggtggagttgtaacatttttctatgtttattattatgacatctgcaaacagagaaaattttacttcttcctttccagttttttgctatttaattctttttattgcctaattgctctggtcaggaattgacatactaagttaaatagaatggttgagagtgtgcattcttgaccagttccagctcttcacggaaattctttcaccttattcccattcagtatgatgttggctatggtttgttgtatgtgtcttttattatttggagatatatttcttctatgctaatttgttaagattatttttaatcatgaaggggtattagattttatcaaatactttttctgcagctattgggataatcatatgattttgtttttaattttgtttatgtggtgaatcacatttattgatttggatatggtaagccatcttgaatccctgagataaaacccacttgattataatatattatatttttgatgtgctgttgaatttggtttgctaattttgttgaggatctttggatttttgttcatcaaagatactggtctgtagtttttgttgttgtgttcttgcctgatgttgatattacagcaatactggttgcatagaatgagttgaggaagaatctctcttcctcaattttctggaatagtttctgcaaaatagtttcagctcttctctgtatatctggaaaaatttatgaatctgcctggttttgttttttgttgttgggagattttttttctactgattaaatttcattaaatgttattggtatgtttaggatttgtttcttcctggtttatttttgaggttgtatgcttccagaatttattcacttcctttaggttttctagtttgtgtgcttagagatgctcacagtagtctttagtgatcttgtgtatttctgtggtatcaggtgtattgtcacctttatctttcctggttgtgtttatttgaattttctctttcttgtttagtgtagctagcaatctgtcaattttgtttatcttttcaagaaacaaacttgtcattttgttgatccttttatctttttttgttctcaatcccattggttttgctctgatctttgttctttcttttcatccactaggtttaggctttgtttgtttttgttttttaaactcgttgcagtgcaacattatgttgttaatttgagatattctgttgtcagtgttgtcagaagggcgttagtctcttattgtattactgtctatctcttttctatcagcatttgtttaataaatatgaatgtttcagtgttgggttcatatttagatagttatatcttattgttgaattgagccctttatcattatataataatctcctttgtctttttttactgctgttgatttaaagtctgttttatgtcatataagtatggctatttctgctcattttggttttccatttgtatgatatatcttttcccatcagttttctttgaggcttggttgtctttacctctaacatgcatctcttgtatgcagcaaatgtttgaatcttactttttctatacaatttgccactctgtatattttaattggaacatttaggccatttacattaaaaggtaatattgatatgtgagattctgttgttgttgtaatgttacctggttgttttgtagcaacagttgtagaattgctttataggatctgtgaactttttacttacgtgtgcttttatgatggcaaattttgctctttcatatttatctttagaactctttttagtatttcttgtaagtccagtctaatggtgacaaattcccttagcatttgcttttcttagcatttctccttcatttatgaagcttagtttagcaaaatgcaaaggttttggctggtagcagttgtcatgccatcagcacatcacccatcccatgtgaaggaaaataagacatgttgcataacatggcaatgtggaagttagtcatcatctcaatgcaagtaggtatgagtaactaaggcgccttgcacttgttcctaccagatttttttttatactttaagttctagggtaccatctcacaccagttagaatgtcgatcattaaaaagtcaggaaacaacaggtgctggagaggatgtggagaaataggaacacttttacgctgttggtgggactgtaaactagttcaaccattgtggaagacagtgtggggattcctcaaggatctagaactagaaatactatttgacctagccatcccattactgggtatatacccaaaggattataaatcatgctcctataaagacacatgcacacatatgtttattgcaagcacctaccagcagatttaatgtcattgcaatggaaggtgctggctctcacctgaattgtctgcttctacacttgatggtagtctgctgagaagcctgtttcttgccaagtgctctgtggctctaagagctggagattctttggtttcaaactttcctaagtccagtgcttctggttgagggtggctgctttcagtagcgtgtaggaactacattgcatagacaatcaccattgtttgtccaatcaccatttagccatccagtcagcctccagccacttatctaacaaatactaactgaatatggaatatggaactctttctaagacctcaaaaaactgctgttgacaaggaaagacaaaatctctatttttgcatagctgactttcaattatttagagccactatggttacatttttgaatgtcacaaaacaatttatcagagttacccaggttaaaaactaattgaggtggagaagaactctttgaggaggtggcattttagctgggacagaaggttgagaattcagctatgaggaaagtatgagagagtatattccaggtgacagggaccacaagaacaaagccatagggtcagaaggagcttgatgtctttgaaaaacaaaataaaggccatcgtggctgggttttagtcacatgaaatgaggtagaggaggagattgggaacaagtcttttagggccaaacaggccttggtaaggaatttggattttagtctcatttgaatgagaagtcatcagaggattttacgcaggaaagtgacttaacggaatgtgtattttaaaaagatgattctggatgcactgtggagaatggaagacaggaggatgtggatgaaaactgaggatggttttagtctttcagggcgaggcaacagtggactaaacgcttgtagtggtgatagagatggagagaggtggaataatttgagacacactacactgttttttttttcttttttttttctattatttttgcccaaatctgccattgctgcaactttgggatggaagtctctcagtgtagttcttccttcagtaaatcccccactaatatttcccagggccactctggaagaaggttttggtcagccatgcttttggtaaccagacagcatgcttggcactacagcttagccaggggtctctttcttattacctaaaactatccttattctttagaaactgccacatcaggagagccacctaaagcctttccccaactctaatcaaaccctggccatctccatctcctggttctatttttgctgcttggccaaattcttggggagtccaccaagattgaagccaccaagccttactggcttcaattcctaagacaagacaatgtcccgtttcccagttctagaaaaatgtgtgggattggtccatagtagactgacctatttaatatgcatggtcctgaagcagcctcgagggtcatgggatggcaaagttgtcatcttgagtcagctgtcaactgctcaagctggtgtgtacaggaaggagctgggcaccagacccacattgtctgagaccaacaggaggatgattcatcaaggcaaatcgaggtgctggcaccagcagaagggagaatagatggctggaagacaaatacaacatctctgaagtacctttcaagctgcgactcctaagctttctcttccaggaaccattctgaatctagactggttggagagcctggcttggtcacacagttgactttcttgtcaaggggaaatgcagacaaatgttgttagtgaccaggtctaatctttcagggaagtcttgcaagagcctaacccatggtccacaggtttctgtgcatgcactgtgaacaagcacccactggtaacgattgcatccagagttgtttcaaaaatttccaagaggaatctcagccctggaaaacaagaatgggtttgacccagagttgcctgcattggagataaactttggagaactccccttgttagcgtactaaaatccccacccagggagggaggagctcattcactttttttttttttttttttttttttgagatggggtcttgctctgtaacacaggctggagtgcaatggtgtggtctcggctcactgcaacctatgcctccccggttcaaatgattctcctgcctcagcctcccaagtagccaggactataggcacatgccaccacacccagctaatttttgtatttttagtaaatcgaggttgcattatgttggccaggctggtctctacaattcctgacctcatgatccgcctgcctcagcctcccaaagtgctgagattacaggcgtgagtcaccacacccagcccatttaccattttttatacatgcgaggtatgtggaacatgaccagtgacaccctttactccatctctacgattaatgactcagctagccagcccagtaaaagcccagctttcacctttgttctgggaggcactgcttaaaaactatccatgatgtcctccttacttgccacataaaatccccttgttgaacccgccttggctgtggtcattggacgtcacctgacaagccattgaacccacctgccatgtgggtaacaagatgaggaagagaaccttaagtgatgggtcagattgtctgactgacgatctgaagacctgatatgaagatattttttcaacacataattgtaggtgtctactctggaccaggagctgagcaaggtgcgtgaggcccaaaggtcattcacacccacatgaccttggaaagagcccgtgctcgcctcatggacagagtacagcacaggcacagacgggtgctcagtggaagttgtgagtaaataaatgacagcttagcacacgcattggtctggaagagacagtgaagttaagtgatgaattgaaaaagtgattaatagaaagcgctgctctcagagccctcgcaaatgctcttctcacagccatgcctctgatcagtcactgtaggctcttcctgcctacagaaatgaagcttggttgcttcacctgggaacacaccccagacagaggtccctcgtcattgctggcatcattccccctgcctggcatagcctcctggcctgtggaaatcctactcacttctcaagactcagctgcaggaagctttgttccctggaccaagttccactgcgttgactcctgcctgtgcgcttctgtgttcctgctgacaccccctgtcactctccctgccacctgcattacggaggacccagtgctcacctgcctctcacccaggatctcaagcacttgagagcagaggctggcctcctgcagccttgtccaagaccctcccacccaagacacagacgatgctctcaccaggtccccgctgggcttgactgctttattttactcttggaaacagcttcttaatgtgttggacataagtagccaagacaccaagggaggtcatggtctcttggcagaaaggcttccttgtgccatggctctcttaggcatagaaagctgtctcatcaaactcagtggcaaatctttttgcaactacctgttgccagcctattaattcagcagcaactcaatggcctgtagggtacttgctggctctgtcttgttgccactcatgctgagggcccaccatgggcaccaacatgccagttgtgggcaagacaggatgggagaccagagctgccactctccacagactctgttggtcactgtgtgggatagggagagtggagagggagggtaaagagtgtgtatggctcttctttcccactgcaatgctagtatctctgtaatttctgcagagttattagttgatgtgacattgctactttgtgtttactttaaaatgcccaaattagggtctgttgatgcagtctttcaaatgagattatgctggatatacggtagcagcaaatactcaggctctaatttgaaaaggcatcattatgggaaatattaatgagtgcttgttcttaatcagtatgggctgggctgaatggctctgcagaaagcttcctggattttagagttaagctcctggtctgttggggagagaatagggccaaggagaagctaaagaagagtacagctatgcttcagtgattcacttcactgttatttgattcattaaggttttactggggaaatgcttatcattgaggcttctgggaaaaaaaacattcaggtgattgatgaaatttcaaaaagtaaaagaagaataagatgaagacaatgacaccaggttttgcatccttgcttgcaggaggtctaaggtttcaactcacacactggatcttactgattgaaagcagcaaatatgccatgattgactaatgatgtctgccatgggtgtggaatagacaaatgaagacaaaaattcaaatacctcactgagcagcagagtcttaatccatcaggaaagcctatgaaaaaagaaaaacagtcttcatttacacattttttctctgtaacaaaatatgttttatgttgaagagcggtacgtaatttctactggggttgatcagatgaaaagagagagaaatctgaagctggtggtagccgtcttgcaccaagagaagagaagctatctgaaaatgaagaccaagctattcttttaggcaaggaaagctaccctatagctttggttacatgagcccatttttccctgtttacttatgccaatatgaactgggtttatgttatttgctacccaaagcaccctaatagatttattaaaagagccaagatcacttaatttcttttggctttgagtggtcttacctgtcagtggaaaataataaacttatctgtatttgtttaataggattgcagtagaaaccagccgagacaaaagatgccggagttcttggaaaaatgtatgtgaaatttcaaaaattaaattctagggggatgtgtgtgtgtgtgtatggtttgtgtgtattataatgaagaggacaaggtgatgtgtatttcagataatgaggtagataatccactacattctgtttttgattctggaaacactgatccataaaaacatgctattctctatgttattcctgccacatccaccaaaaccagcaaattctttcctttgtagaatctgcttttcaaatgaggtttcctatatgattgaacactttgattatatatgtatttttgattacctattttcttacagcatcctgaaactttatctgcacttagtaatttattcatgttgcctgcaatgcccccctatgtagcactttgagatgattctctgtggacctggccttcccattgattttgagtctcttatcgaggacctaggtagctttctgtgactccagaatattctaagagagctgctggaacagcagtgctggaagtctttgtctgcactcttcagggttacaaatgccaggtttttctcaccatccctgctgtggtccagcattcagctcctgtgaggtgtttgtcttccatggttcaggaatccttcaaagccactcacacaaccgagattgtgtcccatgggcagggaggagcatcctctgtttctgtcccaacactcaaggtcttttctggtttgagactcaaagatcaagtctacaggttccaaatacaaaaggacatctaatcactcaggaagccaacaaccatggtgattttttttctggttttcacttgaatcttatttttgagatacggatcctttgaaagatcttgaaagatcttccaagaagacaatccacatatctattaaagtcaatcccttcttctgtcatccaaatagaagatggtataccccttcccaggtgcatggaaattccagtatctccaaggactccaggaggaatttcagttctcatagttactgctggctcttttggcctatatcattttcttttgcatcatgcttttgttagtagtttcatttttccacaccaaattgccttgcttaacatcagcctgattcttttgggtagtggtagctgcccagaacatgactgcctcacagctgtgcatggtagacttccctggaagttcagaataatccaagtgtgacgtttggcatttctgcccttaaagttttcccggccatctcttctctctccctccccccaaatccaccttcttttatttttaaaattttgttcacatagtagcctcgctaatcacattctgtgctcaaagtgctttgccttcatccttcatatgcttctcaggtggtgcttctaaatcaaaaagggttctctagaattctctccccaaggggcattgtatatcagctttatcaactcttggaataaattatttcattttcaccattattcttagcatgaatttgcaaaaatttaatgtataacaaatgagaaagcatcagggaaatgtcctgacccatattatgtctggcaaatgttagctactattactggcattatcattatacagagtagatgttttgtatacattgaatcattgaataagcaaatgactgaatgaatgaatgaactgaccatggtcctgggggtaacctaaagtctaggagtgttttaggtagatcaccatagcctctctcatttctccttagttgctctggcttttctcactgaggttgcaaagagacataggggacacatgtttcattagtatcattttgaagatgagaatcaaggcctagaaatactacttttacaaaggcacgtagctggtaagattctaggcaagctgagaaatgcacacaatgtgggctttggcgtaaacttgcctgggttcaaatgccaagtgtaccacttaatcacttccggcctgcagcaaattctcagactccccttagcctcaacaaccttgctggcaaagtgatggttataacagtacttacctcttagaggtgctggacaattaaacaagagtgtccatgtgcagtacatggcatgccctctgcccagataccaagcacaccaagatggggccagctcctagtcaaggacttttttcccacattttcccttcacttcccttcacctgttactacaaagagtggatccatcctgtatcatcacagggaatgttccccctctctttagggactagcccagatgttctatacatcttgggtctgtctgacattgccatcacttacaattatcctgcaaatccagctttcaagctctggcagtgttatgggatatccccccaaaattcatacgttgaaatcctagccctcaggacctcagaatgtgactgtattgggagacagggtctttaaagaggtaaactgaaatgaggttactaggatggaccctaatccattatgactgctgtctttacaggaagagaagatttggacatgacacatacagggggaagcccacagggagaagatggctgtctgcaattcagaagagcagcctcagaagaaaccaacctgccaacatctttatctgcgacttgcagcctccaaaactgtgagaaaattaatttgttgtttaagcatccagaatgtgagactttgttacagcagccctagcaaattaatacaagcagcaaacaaccagatgtcccgcttgaaaacctcatccaagaaatagaaaaataaatgttgtgggaatgatgtttgatggcggggttttattctgcagttgcctacaggaatgacaacagaaaactgtaagacggtgtatttcaaaatgagctctgcagaaaaccagtatgaaaggctctgaaaaaatagaaataataaattttcaagaacaccgagtttgggaaaatttatatactctaatgccctcctacccaccttttaaaaactgtaatgcttatttagagatttgagaagtcccagagaaaagccagcattctgttattacaaagggagatgagcagtctttagcctccacagtctttagcctgcagctgaactggggttcaatgaagcccacgttctgacatctttacttggcagtccctctgtgtctgacattggttcctcccagtgggttattggtcttgctgacttcaagaatgaagctgcggacccttgcagtgagtgttacagttcttaaagatggtgtgtccggagttcattccttcagatgttcagatgtatctggagtttcttccatctggtgggtctgtggtctcgctgacttcaggagtgaagctgcagacgttcgcagtgagtgttacagctcttaaacatggcagtctggagttgtttgttcctcccggtgggtttgtggtctcactgacttcaggaatgaagctgcataccctcgcggtgagtgttatagctcataaagctagtgcgaacccaaagagtgagcagcagcaagatttattgtgaagaccaaaagaacaaagcttccacagcgtggaaggggaccccagtgcgttgcctctgctggcttgggtgcccagtgtttattcccttacttggccccacccacctcctgctgattggtccattttacagagtgctgattggtccgttttacagagtgctgattggtgtgtttttacagattgctgattggtgtgtttataatcctttagctagacacagcactgattggtgcatttacaatcctttagctagacaccaaagttcttcaagtccccacccacccagaagatcagctggctttacctctcacctccagtatgcaaagagccagcagggaagagattgagtttagatgagaaaagaagcaggttgtgcttgggcagccagcagggccctataaatctgcatgaaaatgctgctcagaacagagagggcacatttcaataattagcacatactttaacaccagctcatgtctgtcacagacaggaaattgtaacttctgtgtactgggccgttgttcaaagctgttgtcagggttaacgatgtacctgcttgattattggtagctggaaattgaggttgtgctcacatgtccataggtcttgcattcctcagagctcagagactgccgtgctcacatgagaaagggcacagcatgttagtagaggggagcaaagagggaggctgggagaggaggctgaggccagatgctgcaaagacatggataaatctcaggaggctggacttgctctggcagggagtggggagatgatgaaggacactgaggtgtgagggtggcctttggttttaatcaaaatgaagcccatgctggcatctaactaagataatagcaccaagggaaggaatgggaagccggggagctagaaagcaggtatagtaggagaaagttctgacccaaaggctttgggcagatttgaggaatgtgaagaaatttggggatgaacaggttctttgtggtttgatgggacagacaggaggatgcattgcctgtcacttgatcagggagtcaaaggggagcagggcttggaccaagagaggttctgtattaaatgtcaagtgtttataaatcagggtgagagtccctcttgctgaatctgcctcttttatcttggctgttccacaacatagattccattgtgcaaatgatcatatggacattgtgtgatattctaagccaaaaagtgactctggcagttccagcccatgagtatcttttggcagagttctagtgtgagaaggagttcctgtgcagcactgtctgtctgactcagctctgcaggaacggctggaaccacagagctcatgagggtacactgttcacaggcagggctcacacacgctctgcccccagctcccacgcctgagcaggtcacaccaactttgaggcactaccctgagcctaacatgttttaaaatgtgaatcatgcttcaagtgactcttttgagattggcagggatggaaagagtccaagttttaaacttagtttaagttttaattgtagagatgacaactgacacagatatgtcagaaaaacatgttggaatgtctcgactggcagtggtaattctgtgagctcagttcacattgctctggcctctgacttgtaacatttaggaacctgtgaaacatacaaatctatgcacatgaaaaatccaggcactaagaactcagccttgattagccattaagtgtgctctccgtagaaggggaaaataacattgtaaggaatatgtttaatctttgtaaccaaatccatggtttttaacatggaatatggaaattggtgccactaattatagtcatttttatcagttcattgaagttggctcagcaggctctgtttctcccactcttctctggcaccacatttaattgtcctgtgtagtgtaaggtctgtagaatgaaacagcactccttttcaaatagtgtctaatgtgagcctcagtgatccagaccagactctgcaatgcccagcagcctgggtgagaagtttgaagagtttgtgagaacaacgatgtcttgaatgggccatgaggaacactgcaactctgcttttagatggatttccacttttcttttctgcaagcgttttggagaggtagcatgatgcacttctctgaacaaaatattttcataagttatgttaatggagaaatttcttttggggcttaagtttctacttacctttgtaacatatttttttcaaaaaacaacaagaaaaaaacctcattatcttcctctcccacaatcatagcagtagaaaggagataaggcaagtcccacgtggaccggtggctgggtgtgctgccaggatagataaggcgccccttttacaaacagtctttaacatgcagtcacacccgcaatctcggtgctgggtaataagaataattgtgttcattacacagttgaatacaggaacctatttctgaaatgattattcttgtctagaattacacagaattccaccgagtggcatattcaagagaatttttattaggggaattccaaggagctgcttagtggcagaaagaatttatatttaatttgatttctcagaaccagggtattgtggagaaaggcatcagataaccacggagtgctggttaagggagggaagcctcactaagcagggttcacgcgttcaagccccgcagccaacaagcaatcgttgagactgtcattcgggagtgggcaccaagatgcctcgggatcccagtgaattcatacttcctgcctcttatatccttgcatttggttacagaggtggcacatgctttattactgagcctggttgaaaatcacctctggtcagaccttcacagctcacctacgtgggcccaggacttgtgtgtagagaggaatgaagggttttgtaaaagcttttaccagtgtggagaattctccttttctcattttgctcttgcataaacaaagatctttaaaacagtttatatcagtagaaagttctatgagactactgtgagcacctttgcagaaaaacaacttagcagtaaattctgatgcttgtctgtagtgtgttaatggtggtccctgaaacgacatgtccacgtcctagtctgtgggtgtgatcttatttggaaaaaaaagtctttgcagatgtaactgagttaagggtctcaggagaagcagataatcttggattaatttatgggccctaaatccagtgataagagactcacagagaagagacacagagagaagaggtgagggccattgaaggtggaggcagagactagaaagaggctgccccaagccaaggagcacctggagccaccagaatctgaaagaagaaggaagagttattttccagagccttgggagggagcatggccctgccaacatcttaatttcagcttctggtgtccagagctgtgacagaatgcatttctgttattgaagccaccaagtgtgtaagaatctgttactgcagcctcaggacactatcgcatgttctcatctttaggcgtggggtaagcttctcttcttcattctcctgggctttagtgcaccacagtgtaaacaccacatcttacacttcctcattatccaacaacagtctccaaggctgggatggttgagtctgcaaatcacgtttgagagtcagaggatgtcagagctggaaggggtctcagtctcctcttaaagagaagatgttgggcaagatactcccttggatctgaattctagacctgtcctttcactcatgggctaagtgcttttgcaagaaggtggtagatgtttttttccaggttgtgctagcttggtctagaaagctcccaggatctggttctagttgtgtccctctgtaacctcaccttccacccccacctcccggatctccagccacaggaacttttctgaacatgttctgatcctgctgttcatatgcttttctccacaccaggctgagagagggacaaagcatcctttaaacccagatccctgtccacaggcctttccctgatcctccaggtggggtcgctcttcccccgctccctctgtgcattgtatgcagtgtgtggattctaccacactctagggctactcacaaggcccagcagacctgcagggtctgtccccaaccttcctcctagagtgacctctcatcacttcaactgcagcccctcagatgcaccaggacccctcctgccatggggcctttgcagatgctgtgctttccctaaagtcctctactcctctttacaatggccttggattatagttaaaatgttccacatctttgttgggattaattgttcaatgtctgtgtcttcactgggcagcaagctccatgggggcatagattatgatggattttctcctagtatagagccccagcatgtagcagatctaacaaacaaagacttggtgactatatgttaaatctatgtagatgatcctccatgactttatgagctcctcaagggtagggtcttcttaattttatatctctagcatttactacagagcctaagctcaggtactattttggttagcattcattggctaggtgaacaaaattctccttttctagagtttagttttctcaactagaaaacttgggaggtagacaagttcagtattccttacactcttttttaaaatggtcatagcttcttcgatggggcaaaggtcccctttttttctaagctaacttgtcccacttaccagtaaaaaagtaacaagccaaataacaacaaagaattggatagaaatataataatttaaaatattcactcatgcttttttttggctggcaaccctcttgttctttttgccttcttttttttcttccattctctctattaattgtcagattcaaactagaccagagttttccatcaccttaaagaaaaaattgttgctgcagaaaggcaaagagaaaaaaaagtcagttctcacctctcaacttcaaaccagactattgaaaccaatggcttggtgtcaccaggggcccttctggaagcagacacacagagctgaaattgagagtttaatgagttaaggagctatttacagagatttgggccacgttcagggtaacacatagccactggcatcgggacgcctttatcaccttaagctagaggagtgaaagggaagagaaagtgtgttaggttgtccttgcattgctataaagaaatacctgaggatgggtaatttgtaagaaaagaggtttcatgggctcatggttctgcaggctgtacaagaagtagagtggtatctacttctggggaggccccagggagcttttactcatggtggaaggtgaagcaggagcaagagagagagggagcaggtgccacatacttttaaacagccagatcttctgagaagtcactcactatcaccaggacagttccaaggggatggcactaagccatttataaaaaaaaaaaaaatcacccccatgatctaatcacctcccagcaggcccccctgtgacattgggaatcacatttcaacatggggttcagatggagacacagttccaaaccataccagaaagcctagcagaaaggactgcttggcaggagctgtgacattcagccggggacccagcagggatggagctggaggaagacatgcccctctttgtgcttgtcttcctttagactctgctagggccacccttgcctaaactcatccaggaaccaggaggcaagggagccatggataaagcccttgcagcggagccacccagagcagagtgaggggcaaagcgaaggcctccagaatggaccaacactggcttcagagaaggaagcttagaaggacctcagcaatgcatttatgccacagcaataaatgtgggaaaaacataataagaagttctcagagccagttttccctccctctcccatcttcatccctcaaaacagataaagacccttgaaactggggcaaaggacaggcattcggggtggaaggtagtgggtggcagggttgaagaagcccactgagggctctgtcatactgaagtaaaagtgagactccactctagaggtgaggctcagacactggaccaaattaaggactggctaaaatagggcctgggcggaagcagctttccataagacatacccaccagtgtgccacatcagcttaccattaccgtggcaacacctggcagttaccgcccctttctatggcaatgacccaataacctcaaagttaccacactttttctaaaagttcctgcataaactaccccttaatctacatgtgattaaaagtgggtgtaaacatgcatgcagaactgcttagaggtgctgctactctcagtgcactgctcatggggtagccctgctctgcaagagcagtcgtggagctgccacattgctgcttcagtaaagccattttctgctgggcgcagccaagaaccctcaaaggctgagccccacttaagggctcacctgccctgcatcaatatcccctgggctgagttccttaacaataaagaactgaagccctagattaacgccagaagctgagtgcctggggagcctgaaccatacttccagtggagcctagggaaccaacaagtctcctgagggcctccagcaccagcagggtgtgtcagcatcggagctgtggtggagtctaatcaaggcaccagagccccccagcccatgtttcctgcaggcccatgcagggcaggagagatccctttaagttccatgtgtttcacctgtgtacaccccaagaaggtatagaggttgctgagaccagaggtcagggggaccatggaggtcactcagcagatgtcaacattcacagacaatgatgcttaaaagccagaccgcacacatgagcttcttgaagttcttctgcaacttccctgaggaggagaggggaaaactcatgcaaagactgaatttactcatttactaacatgaagtttcagctctggtagggaagggaggttgagagagaaactaagttcagctatagaaacatcaagctgtgtttctttcatgcacacctgagttgtggccctgttcaatagacgtctcctcgattggatcaggtgagcctttgtgtggcccagcaaggcttcagaactcacttgtaaaagtatagaaaggacaggtatcacaagagaggggacacttgcctggcctccccatcctttcctctgtcatttagcttttgtttggaatatagggtaagtaaaaagattaaaagccccacatgaccttggaacttcatcacttagatggtagagagactcataatacacaacatgcctttgaaaccattttaccctctggcctgtgtcaccgggaaaaatctctctcattgttctgctggcccctggccataggcccacaccttggaatcctagtttccagtccactgaagctggttgataataaaaaatgaatccattaagtttgtacctgaattttttcctgcaagcatctaaggaactgataccatcttcttaccaaaaaatatctcacttctactgcatttcatcagagttacaagggattacagctaagtctgtaagggaataataaaatgcaagaaacggaagatcatttagggctgagagatgagttaattcagataagaaaatgaagacccaaggagaaaaaaattatttcccaaagaccaccttctaagttaaagacttaaatcaggcctcttgattgaaagaccaaagtcttttctttctgccattttgactccccacaccaccacagtctccatctacatcaggaagttatggctggcaccttccacagatggacctgagtactctgtctaccccaggccccatactcagcactgggggattacatgaggaggaagacagacctggtcgctgcctttgaagtgtatatacctgcctgcattgaactggatcaagagtcctgatttaggttatttggagtggctggtgcattccaaaagcatctttcttagcaagctgagaccaatcaaagggttgatgcccaaatctcatctgtgcaagcatgagaagacaccatcagctttggactttccatgtcctggttaaaaccagtagacaatttgtgcctccctaaatgaagaacttagtgagtggttggaaagatggctgaagccatcattggtgtaagcattgtcaagggcatgcctgtatggttgcttgcactcaggctgatgtttagtgtaacattttaaagatctgctgggagggaggcttcggggctaaatgatactaagagtccacctcaggaaaaatgctttggtagccgatgaggactgtgttctgaaaactcaaccactgcactccccacgccctatgcacaggtttctatgggacccttgagtcctccacacctgccagtgcaggcagccagggctttccaaccccacaccccaggaaaagggttcctagataccagagcaaagaaaggcagtgtgggatttatagcttcaaaatagtctttggatataaagagtcttgatttgtagagacaattttttgatgcactaaagtctcaagaggcctggcatggtggctcacgattgttattccagcactttgggaggccaaggtgggaggatgacttgaggccagggattggagaccagcctggccaacctagtgagactccatctctacattttcttaaaaaaattagccaggtatggtagcatatgcctgtagtcccagctactcaagaagctgatgcgggatgattgcttgaacccaggagttcaaggctgcagtgagccctgattatacaattgcactccagcctgggcaacagaactttgtttcttaaaaaaaaaaaaaaaaaaaaaaaaaaaaggaaatcgttatcctttaagagtttctccttgccctttagatgagacactaacttctactgcatctataaatccccacatcccctctcctcagtttccaacctcatctcctgcactttccctcctgccagccctgcttggcaaggccttcagctcctcacacacaagcctctgccctgcatggggccttgtgcagtctcttccctcccttggaactcttccacctgcttcccctgtctgtatttgtcctctttgattcctgtttcagccttttaatgtcacttcctcagagagagctttgctgatcttccagtctagctcctggttgctagtgacttcccctctagttttcctgcatggcagttcatgaaactcttagcatgcttcagcgcgtgtcccttctgttaaatgcctgccttccataagctcgcgaagccgggcagaacttgacggtggctctctggtttcaaagatctccacccttgtcactacacaatgctcctgaagaaatgaatctgaaagaaacaaagaagcagaaagtatacatcaagcctatgtggaagagggccactgtaatgatgtctgaagctcctgtgggcctctccctacctggcaggagaagttcactgtgcctcagggacctcagggaggagacagggtgctgagcatggctttggtgtgaccctgggatgtcacccaaccttgttcctggcccatccacagcccctgcttgccatagagccaagtagcttccttatgcagtaggaactcttatccccatttatcagagaagcaagccaaggtgagcaatggacagacctggagctgccagcatgatcatgtgattgcaaaccctgagctccttccaataaccatgtgtcttataaataacagtgatggtgtgagctgtgcccagcaccactgaaaaacaaaatgccctagagacagtaatgtcaaatggagagacagacaggtagacagacagacaggtaatctcccctttgctaccactcaggatgttgcttcctctcagtctatttcccaaatcctcctttccccgcaccccataatcttgtcagggcttacctcctccctatgctctgcgctttcattaatttttttatcacctatccctcagctgtaatctaggactttgtagggacaattaattaaagtgaggaggttcttaaaaggaggtattgacctgcaagtcagccctttctgtctgcagaattaatcttcagattacgggtcaagaggagacatctttaaaaaagtgcccagccaatcgatttttcagatgtgttcaggaagtctcaacagctgtgtatgaacccgattgcatatcctgcttactgcctaagaaaagcataccccactgagtacacgtgagagtgcagcttgtttgaagaatctgttgctgtagaaggattaaagggaagacaaagataaaatgtgtattttaaaaagcatctattgatctatctatctagctatctattatatatatatttccggtcctcaatcctgggcagggtgtgtgctgtcagagatgggcaaggatgggtgccagccattggagagctgttccagggagggagccggaccttagccagcccaggcagcaccagagaaagactcatccaacactgaaatagacggccccagtgtgcgcgttacaatagcaggtgagtaaaactgtctattgtacacatgcggatataggagctttgcaattatctagcctaatgtgcagataaggaaatcggggccctggtaggtacatgactttctcagtcttgctgtgtatggtccattccccaaactgaaattcaggacctctgacacccaggctgggctctaagacatgctgccatttctcaggggagcaattgagagaagcagccaggcattttcctgtctgaccccaacaccagggttctaatctcccttaagctcacacagcacctccccaaccacttttgtggagagaacaaaaagaaagatgtcgatttacccggagagcatctgtcactaatagtaacatgcggccttcactgagggttaactgtatgcaggtgtcgttcttatcttcttacaagtattagtccatttacaaataaagtgtgggaggcttagaaaggtcaagtggcttgtctaagctcacagagcaagtcaaagctggaaccagaattctgggattagtcctgtgttgcaacaattctttattgcctcaacggacaaggtgcacatcaatttgaattacttcagctaagctgagtgacttgattcctgttccttacattgatgaggatgccaggcctgtgcctaacccttatcaggagctggagagcacaaatgaagggacaaagagaagtacacggtagccgagtatagtgaacaaaatctcccgcttaggtcaaacaggggcacggttgtgttctgcctcatctcaagaaaagttaggacctaagctccatgatcatcggttttctcatctctaaaaccggcataataacattcaccttttagggttcccagggatcttggattagtctgcacacatttccaggaacattccaggcacctggggagcagtacagctccttcaggaggtcctcgatcatcatgaacagatgttagtaatcatgactgacacagatgctgcctacgggatgatgacggtggtgatggtgatgataaagttgtggttacgctgctgctgtgatgatgggataacagtgaggacacaagaaagaacacggctctgccatgtcaggaccatttaggtcagtggttccgaaccaggagtgatttcacccacaggggatgtttggcaatgcctggaaacacttttagttgttcacactgttgggggaggtgctattggaatccagtcgtgggggccagggaccttcttaagcaccctataatgcataggaaagcccccacaagaaagaatggtccagccaaaatgtctgtggggcccaggttaaaaaaccctggtctaggaggacagaaaacctgaacactggaagtgagagattgaagcttccaggagccttgttgactacttaacaaacccctttcagctgctgctttaaaccatacaggaatctgcaccttaaaggaagagggcagagttgttgacagtcaggaagactatggtgaagccgttccatgggacctcctccctctatttgccgggcagcctggtgcagctgcgtccccggcccctccaagtccacgtggaaactgtcccctggttgtctagatgtgcaaaagggtgtctgcaggagcagtcttgctctcccaagcctctgacactgtgacaggtggacagaagcaggagcgggaggaggaggggagaggaggaggagagccacccataaatgaaagaacaatggagcatcgatcagcactttttcacagcaggggagctgctttgctgagccccagcactgtcagacagaccagacccttgattaaacctgtgcaactgctggcatggatggccgtgcttagctcccatcagcaactctgccagaaagaagaggcgccacagaagttatgaaggggcccagggctggcagctgggtatctggagggctggtaccctcttccctccaccagagctggctccaaatttcagactcaaagcagaaagtttattctgtatttttccaggagatggggctggttggaggtgagagcacagggaaggctagattccctgggaatcccctgttgttttcctctctgggaggccttggtgtgcaggttccagacactgccctagttctcatcatagggcagggacacggggagtcctcaccaaattccaaatgcctccacagagagggaggctccgtgtggtgatgaaacctgctctgttcatttcgtcatttggaattctcttggatggcctgtgagttttctgttatagaatcaaaaaccacattttcttaaaagatgacagactgtggtctgttctgcctgagacccccatgtgatgccagagaagccacaactcgcaggccctgcatcacctgctgctgtgtgcagatgaggaagtctgtcttcctggagggggttcttatgagcacaaacagtgacgaacgacgttaaatgcatgatgaaaaactaagccaccacagaaagccagctgctcaccccatagaggcacagaaagctggctgctcaccccacagaggcacagaaagctggctgctcaccccacagagggagagcactttgtggatgatacctgatttttttctttcttttctttcttttcttttctttctttccttttctttcttttctttttttctttctttctctttctttcttccttccttccttccctcccttccctcccttcctcccttccttccttcctttcttcctttctttttttgacaaaatttcactctgttactcaggccagagtgcagtgatgggatcacaactcactgtaacctcgacctcctaggttcaagcagttctcctatctcagccttctgagtagctgggactacaggtgcacaacaccacacccagtttatttttttgatttttggtagagggtgttgctgtgctgtccaggctggtcttgatctcctggcctcaagtgattatcccaccatggcctcccaaagtgttgggattacaagtgtgaccgccatgcctggccaagacctgcttcttaatcattgttggattcacagagcttcacactgtgccatccatggtaccatagagagaaaggaaagcacttgtaaatgtgtatgttactgcccccgctacctcccagggaggtgaatccctcatcaggggcctctgctgagtggatgatgggtatggagatgggagggaggggaatccctcatcagggcctctgctgagggggtgatgggtatggagatgtgggggaggggaatccctcatcagggcctctgctgagggggtgatgggtatggagatgcaggagaagaggagttggtacagagctgaattgtccaacatacaacagagaaataaatgaaaagtaaggcagtggctaacatggggtttgggtggggccaaggaaaattgagtagctggcaggcgggtagcaggaaaggggaacgacgggggctgcgatgttacagggtaggttctgaagttgtctgacaggtggtgagtgatagagacctttttcttgatctcccagtgaaaactttagtaatcacacgactgccacttttgtaaaaggggcttgcatttgggggctgcaaggttggcgcaaggttagatccggggttgcccgtgggagacctgccacagccaggctgcatgggaacagagcactcgcttcttctcatggctgtgctggtgcatggcagcccctgactcaggtccacagtctgacactgccaggttcaaggttggactttacccctggcccagatctcccacaggctacttattcctatctccttccaaattcagcaactcattacaccaccttgaagaagatggggcagagcggaggggaggctagagggacaatcccaaaaagagccctaaatctacatcagattttccttttaactaaaatctatttggtattcagcagaaattttgagtctagtgtttgacataatttaatagtgtgcattaatgactataattttcccctgtagtcgagatactaagaaaatgagacgtgcttcatctacaccacacacaacagtaaccaggacagacttggaaatgacagtaaagaacaaagtccgtgagggccaacagcttgtggggaacttcagagacacgcagcactccacatagaaagcacattccactccagttgtaagaaggtttgagcctccctggtatttgttacgttcttttacgctgactacatttctgtgtggtgagtaaaaccattctcattgtgcaggtgccaaagctgaggccagagggattaggagatggtatatgtccaaggataacattaagatgttttaagttcagtttattttattttattttattctttatagacagagtcttgctctgttgcccaggctggagtgtagtggcacaatcacagctcactgcaacctggaactcctgaactcaggcaaaccttcctcctcagcctcctgagtagctaaggctacaggcatgcaccaacacacctggctattttgttattattattattattattattatcattattattattattattattattcgtagagacagggtcttgctatgttgaccaggctgatcttgaacacctgacctcaagcaattcttcctcctcggccgccctaagtgctgggattgcaggcctgagccaccatgccagtccataaagttttattttaagtccttagatgtgggatttcctttttagagcagcaagtactacctgaactaaaacaggtggtcttgcaacttgcaatggattatggaaatagatggcatctatattggtgaggttctcaccaaaactcaaacagaataaatgtcatttgaagaacaaatctcaactttaactttctttcatccatgggtaagtgctacatttttgaaaaaaatatgaatttaaataaaagtaatttattgtggtgagaatatatattacctgtcacgaaacatgtccttctgtatgttaacttacccaggcaaatgaaaactttagtaaaaacatttatgtctatatctgtcttctaaactacacctgtgtgtgtgtgcatgtgtgtgtgtgtgtgtgtgtgtttttgaggggttcctactttctgatgtacaggactctgaggcctgaatagttcattgccataaactgagttacttcttttggaaaaacataaattttgttattttagtcttctttaactttcatgtgtttgacttgccttaattatatattggtagaattaaatgtttcatgatcagaatttggacttttgcacatgagtccacaagtgttggaagctttctcaggtgcagcaatgccaatctccaaaaggtccaactcggtaagccagtgtttgtgccactatttatgtgtttgttattttacgcttcaaaaaataaattagaacagaacagaaaaatgatactagtaacaaagatgtttgtcccatcactgtaatataattaagaccgagatggaatggatcaatgagctgcatgcgtaagtctccatctcaaatagactttcaaatggttgcattataaaggaaaaaaaactagattcaatgaaatgtgttcaatattatgcataaaaggcacaatgtattcagatattttatactagttttcggcttctggcaacagagcacatccacccagctaccaccacagctaaaactataatactatttgttttatgatgtcttttatacatgctttcaagaacacattatatacaaaataggtgtttctaatgtgcttcacttttcctgtggcctcccagaggctaaaagccacatttgtagcacagttttcatgaccgtagaggccctgaaggcctgaatgtcatctcttccccactgttcactccttttactggtgttataccccaactctatggaacactattaaacattttctttggctccaatgttttaaaactcaattgtctttgttcagtatgaatttgtgatctgtgtcaaatcctcgtgttgtgtagtgaggtggggaacaggtgaaggcataggggttgagtaaaatgctgagcatgcaacaggtgctgggcaagtgaccgtgaatgctgggaggacccttctgcctattcttccataatggcagaagtggacaagcagacattagtgtacagtgagaccacatctatagcataggtgtgcacaaggtgactgaagacctgggagaaggatgtgtaaaccagcaactagcgaagggctcttcaatagcaaaactcaaagcatcccttcggcatagaatatcaactatctaaggagtaaaaattttaagttgacttttgggtctggttcagctgacagagtgagcatgtatttatttcctgtagtggattgaatgtttgtgccattccaaaattcatatgtttaaattctaaaccccaatatgatggcattagaagatggggcctttggaatttaatgagctcatgaaggcttgaggtggatattccattctccctttgattttcctaaatattgcccacatcttttaatatctgtctccttatccaaatttgcccaattacatagttaagggaaccatctgagacagataaactctgacagagagtgcagaatttcaaatctagaaattcgtactcttctaaactactaagagaataagaaataagatgcatgtatattatctatggttataaaagtaactgaaagcataactaaaaataaagttatactgttaagagaatgtgtgaggaagagatgagagggtctagagaagtgcaaagagctaagctatttgtcttccacattaaagttaggggaaaaaaaaacttttatctgagaaatgtgagccctttcaaattatcaggcctggagagacataaaaatgagacagcaatcatatcctactcctgcttttgagctatgtatttacctattgaaatggcttgctattgtcacatgcagctatgaattaacctaataatgcctcaccagacactatattccacaccccacagtacaacaatgtatagctgatcagtgatcagttttgtttctgtaaaccaatgagaattcctgacaggattttgcacactccctttccccctttcttttcttttcctttaaaaacatgcctgtaacaaaggccgaacaaagctcatatccaaggttacttgggtctgagcctcctgggcagcttgtccttattttagcatgcgagctgaagactcacaaggctcacaactttggaaaggacacctttatttctcataaagggctgcaccctgcaggctggccattccacaggctgagaagcatagcctccagcagaagcccaaagcttgagggaggtgtgaagggaacaggaatttatgctgaacaggttggctaaatatacatatttaataagctatagaagatgtcatgaatatctgtgaaaggagaaacaggcacatgtgcaattgagcttcatgcctcttcgtgggtcacatattcaaaaaatggtgatcttggcatgatctaaggagtctttggccctctgatgtcaaaaagtgacaaagaggggaacacaaaaactctcactgagcatcctccacaagttggccaaaactagtccagagttggtggtcagtttttaggaaggaaagcattgtgaaactgctgagctgctgtgccaaacgtgcagagaggaaaggagagtccagttgtggcctcagatgactggctaaaggtgatagaaaaatgagttgtccgtttcttgctttctagagctggtttctgcctactccttaggaaagaattctggttaaaggttaatgagaaagggacttactgaggcgtgtctgacctcccatcccatcacagccaggaaaactcagtttttaaggtttatctgggatcctcctggctgtttagtccactgggggacttaggattttatttttatttctcagtctcaagtaaactgtttaaatctcactttgtgtttcattctcttctttttaagtggacaaaagagaaaaaaatagaagaattcctagaatttacatttattcagtaagcagcagtgtcaatgcttaaacaattatacagtaatactaaaaagttcctttctgcaaagctgtggttgagtgggtaatgaattcctaaatgctggaaatgacaagatgtgtaaaactaccctctgttttttaaatatttggctagtccttttctcccacaagcttcctttgtcccatgattaattattctaaaatggttgggccatttctccagaatatagaatatgttagctgtcattaccacacacttgggaaatggtagcattcgagtctcttgcctgagcatggctgtgagaggtattcagaggatgctgtggggagataatgttttggtttcacgatcaggaactaaaatccagaaggatctcacacttcagtgcattccaaggcacccctgttgactattgtatagaggatcccaaaagataacagccacctggagaaggaaagcagctcataacagactgagctgtgtgtctttaaaaaaaaaaaaaaaaaaactcacttgtaactgctactaatgagagtgtgtattcagggcaacttgaatctatgctcccaggtggccatcttcaagctcaaataaactctatacttaatcataatttctgaatctcgttgtttaaggttggtacaccacaatggcctagcatcctcctgttccatgagcaacagacaccattcaaagggctcttcctccaatatctagactctctttgtaccagcaatgttaactgtggagcaattatttggtaattaaacaaccacagcagtgttattagctccacactctgaatgacatctttaagcctctctaatgtgttaagcatgtctaatgtgtttttccacttttggataacttaagagaccagaatatgccatctcaaaatatacccctttggcataagcattattttgagccaattatttttgagaaacagcagacaccagagaaacagagtagaagttactcttttgcaaggaagacttacttctatgatgaaaattttctttcataagggtgccttcctttcagcactaggatgagaaggatggcttaatcacaagagactctcatccatagagaaagctctgacttaaatctgcataacaaacttcaccctttgtctgccatgcttttcctggtcacctttccagaactggcctcccccacagcctcctttctttatttcagatgaagatggtagtaaagcctgaattctaagccttttttttttctatttttttttttttttttttttcagattttcccgcttttcctgagtatctcctatgtatacaaaaggaatacatgttgataaacttctggtttgttttgttctagtaatgtgtctttttttttaacaagggatcctagctaagaccttagaagaataaacaaaaaattactttttcaacccctgcaataatcaactttattgggataaagattcatatttattgcaatatgtcttatctttatggaaattcaaaaagaattcaatcacagaatcaaaattccagaactgtacccaaatattagtgaaaatttagtatacaataaaagcaacatctcaaattagtggagaaaaaatagaattattaaaaagtagtgttggaaaaaccatataaccatatagaacaaggtaaaattgaatccattcattacaccctataccaaaaagttctaaatatatcagatatttaactgtaaaaaaatgcaacaaaacaatttttttaaacttgataaatttttctatcatctgggagtgaagaaatgttttcctaacataaaattttgaaacataagaaaatgtttaataaatttacataaaatgtttaaaatcttagtataataatgtcagaggcatttgaaccagagtgactccatcttgagtaagctctggataaaataaggctgagacctactgggctgaattcccattcttagtcacaggatgagctaggagattggcacaagatacaggtcataaagaccttgctgataaaataggctgtagtaaagaagccagccaaattctaccaaaaccaagatggcaatgaaagtgagccctggtcgtcctcactgtttgttatacactaaccataatgcattagcatgctaaaggacactcccaccaacaccatgacagtttacagatgccatggcaacgttaggaaattaccctagatggtctaaaaaggggaggaaccctcagttccaggaattgcccacccttttcctgaaaaactcgtgcataactctccccttgtttagcatataatctagaaataactataagtatccttagtccagcagcccaagctgctgctctgcctatggagtagccattctttattcctttacttccttaataaacttgctttcactttactctgtggactcccctcaaattctttcctgctgagatccaagaaccctttcttggggtctggattgggacccctttctgggaacaatagaaaaaataatctaagtaaatggttaaatggcaaaacagaataaattatttgcaaagtatatttaaggcaagggttaatacacctaatacacaaagaacttttttaaatgttggtgcagggaaccaattactttataataggctaagattatgaacacacatttcacagaaacataagcacaaatatctcttaaaatattttgaaaggttaaacctaacttataacttaaaatgcagattaaaggtgtactgagttgtgtgtaaccagacacaaaaaatctaaaagcttgatgacatatttggttggtgattctatgagaaataggccctctgataaattggcagtgttaagtgcaacatgatacagtgaaggaaaattcagaaatatccatcaaaaccatgtatgcatttatcctttcagccagccatcccacttctaaagatctagcccaaggatgaaccgagaaagaaaagaaaagaaaagaaaaaaaaaaacatgaaaagaggctattcactgcagcactattagaaatagcaaaatctcaaatgcctaccagtagaaagttggttaaatagagtagagtgcacaacacaactgagtaccatgcagctgtgaagaaaaaaaaataagagatatcttcatacactatatggagtaacctccaggctatagtaaaaagattcttcaaaaggaaaataatgtgctagtacactatcatttactaaaacataaaattacaaaaattcaaaaggggtgaagaatatatatatatatatatatatatatatatatatacacacacacacacacacacaaacacacatacacacagatacatatgaaggtgtgtgtatatatatacacacatgtatataatgtatgtacgatttccttatattaaaaaaaggaaagataaaaatggttactgtatctgccaactgtaactgcaataatggcatgtgactttattagtctcttttcatgctgctgataaagacatacccaagactgggcaatttatgtaggaaaaagggcttaatggacttacagttccacatggctggggaggcctcacgttcatggtggaaggcaaggagaagcaagtcacatcttacatagctgtcagcagacaaagagagagcttgtgcagggacactcctccttataaaaccatcagaactcatgagacttattcactatcatgagaacagcacaagaaaaacttgcccccatgattcaatgacctcccattgggtccctcccacaacacatgggaattcaaaatgagatttgggtggtgacacagccaaaccatatcatttcacccctggcccctcccaaatcgcatgtcctcacatttcaaaacccaacatgccttcccaatagtccccaaaagttttaactcatgtcaacattaacttaaaagtctacagtccaaagtgtcatgcaagacaaggcaagtcccttccaactatgagcctttaaaatcaaacacaagttaattacttccaagatacgataggggtacaggcattatgtaaatacagccattctaattgggagaaattgggtgaaacaaaggagctacaggccccatgcaagtcagaaatccagcagggcagtcaaatcttaaagctccaaaattatctcctttggctccatgtctcatgtccaggtcacactgatgcaagaggtgggcttccatggtcttgggcagctctgcccctgtggctttgcagggcatagttcctctcctggctgctttcatgtgctggagttgagtgtctgtggtttttccaggtgcacaatgcaggctgtcagtggatctaccattatgggctctggtggccctcttctcacagctctactaggtggttcccaagtaggaactctttgtgggggctctgaccccacatttcccttctgcacttccctatcagaggttctccatgagggcctttcccctgcagcaaagttctggctggacatccaggcatttccatacaatctctgaaatctaggtggagtttcccaaacctcaattcttgacttctgtgcacccacaggctcaacaccacatggatgctgccaaggctgggggcttctactctctgaagcaacagtctgagctgtaccttggcctcttttagtcatggctggagcagctgggatgcagggcaccaagtccctatactgtacacagcatgaggaccctgagcttggcccatgaaaccattttttcttcctaaacctccctgcctgtgatgggaggggctgccacaacggtctctgacatgcactggaaacattttcctcattgtctttgggattaacattaagctgccccttacttatgcaaatatctgcagccagcttgaatttctcctcagaaaataagattttcttttctattgcattgtcaggctgttaattttccaaacttttatgtcctgtttccctttcaaaactgaatgcttttaacagcacccaagtcacatcttgaatgctttgctgcttagaaatttcttcccacagatactctaaataatctctcttaactttccacaaatctctagggcagaggcaaaatgctgccagtctctttgctaaaacataacaagagtcacctgtgctccagttcccgacaaattcctcatctccatctgagaccacctcagcctgataatgattgtccatataattatcagcattttggtcaaagccattcaacaagtctctagggggttccaaacttttccacatttttctgtcttctcctgagccctccaaactgttccaacctctgcctgttacacagttccaatgtcactttaacaatattgggtaacttttcaacaatgccccattttactggtaccaatttactgtattactccattttcatgctgctgataaagacattcctgagactggagcaatttatacaggaaaaatagtttaatgaacttacagttccatgtggctggggaggcctcacaatcatggcagaagggaaaaaagagcaagtcacgtcttacgtggatggcagcaggcaaaaagagagcttgtgcaggaacactcccctttttagaactatcagatttcatgagacttattcactatcacgagaacaacaccagaaagacctgcccccgtgattcaattacctcccattgggtgccttccacaacaagtgggaattcaagatgagatcttggtggagtacagccaaaccatgtcttgacaaactaccttaaattcagtggcttaaaagaatagccactgattcccatgttcccaggcctgtgggtcacaccaggttcgtcttctttctttgagatgtgagtctagggtcaggaggggcagctctgctttaggctgtggatcttcaaggcagctggtgtaactgctcatgtgtctcacttggcaacccagctgaaagactgggctaccagaaatgaaactgcctttacaaagatgatgacagtgaaagaagtctagcatggctgactccatcttgcttccagcctcagagactggttgtccttgcttatgcctgggcagaggtcaagctaacaacaggaggaatttagtttatagttaaactttgaaggaaggatgaaaatagtctttccctaaaactgatccctccttgtttaggggctgaaaccacctttgtaaaactaacaaaaggccacaagattataggagaaccctgaattctcctactatgtagttgtagtttctataattccttatcgcccaggagtcatgtggccagaggtcactagatttgtaacttccccagttgctcctacaatgctattatagaacctaagattggtatcttgacacattttttagacttttgcattctggcaacagactaaccccacctggacttgcgactcatcactcaaccggtcctatggcccctacccagaagcagacacagcacatgaggactgttttccacacccctatgatttcacccccaaccaggcagcagcacccattttctagcccctgcccaataaactatctttgaaaaaccctaacctctgagccttcagagagactgtgtaaagaaatataaataaatcaatggaacagaataaagaatccagaaatagatccacatatgaatgatccaatgatgttcagccaagatgctaaggttattcaatggagaaaagatagtctaatggggaaaagatagtcttaacaacaattggtgccatatccatatagaaaaaaggaatccttaatctttacctcacatcatataaaagataactcaatgcatcatagacattaatttaaaaactaaaactataaacttctggaagaaaatatagggaaaaaatatttggaacctcggagtcagaaagtttttttgatagaaaacaaaatgtatattttagaaatctgctttttgaaagacacgtgtgatattggtctttaacctggtttcctgacatgcaactccttttgaagattataatcttcaaaatgatgtattttgtttcatattgagttgagttgtggccagggaaccgtaggtagcttcaggatgggggcagttaccagaaagaccaaggcaagattccagggtcaggactttcaaccgcacccctcaaccgctgagaagagaagaggagctgagggttaagttcatcaccaatagccaatgatttaaattatcatgtctacgtaatgaggcttccataaaatcccaaaagaacaaggtttcgtggccaggcgtggtagaggccaggtgtgatggaggtcaggcatggtggctcatgcctgtaatccagcactttgggaggccgaggcaggcagatcacctgaggtcaggaattcaagaccagcctggccaacatggtgaaaccctgtccctactaaaaaatacaaaaattagccaggtgtgttggcacctgttggcgcctgtaatcccagctactcgggaggctgaggcaggagaatctcttgatcccaggatgtggaggttgcaatgagccgagatcgtaccactgcactcaagccttggtgacagagggagactccgtctcagaaaacaacaacaacaacaacaaagaacaaggtttggagagcttccagacagcagaacacatggaggttgctggaggacggtgcacccagggagaatgtggaagctccacacctcttccccactgcctcaccctatgcatctctttctctttattctttgtaatatcctttataataaactgatgaacataagtgtttccttgatttccgtgagccactctagcaaattaattgaacctaaaaaggggattctggaagccctgatttatatagctagtcattcagaagttctgaaggcccgaacttgtgactggtgactgaagggtgcagtggtccccctcacaggctcagtgactgagctcttaacccgtgagatctaaactgtctctaggtaaacagcgttgaatgggaggaggcccagctcgtgttcactgcaggcttgattgcttcctcattggtggggagaaattcccacacatttggtcacagaagtctttgttgattattgtgtgggatgacagcagaagagaaacagcttgagttcttccactttcaacaccattaagaaaatttaaaggaaaggtgcagtttgggagaaaatattctctaaacgttcatttgataaagaacttctgttaagaatatatgaagaaccctaaaactcaatttaaaaaaagacaaacttggaattttgtttgtttgtttgtttttttgagacagggtctcactctgtcacccagactggaatgcaaaggcgcgatctcagctcactgaaacctctgcctcccaagttcatgtgaatctcctgtctcagcctcccaagtatctgggactacaggcatgtgccactgtgcctggttaatttttgtgattttagtagagacagggtttcaccatgttgcctaggctggtctcaaactcctgtgctcaagcgatccgcccacctcagcttcccaaagtgctgggattacaggcatgaaccaccgtgcccagccaaactctgatttttttaatgggcaatggatttgaatagataatttactaagtaatgtaataaatggcaagtaagcacattaaaaaacctacaatcagatgatcttcaatgggtgaacacattattggcacatcatggcacatccataccatgaaattctcctcacaataacaagaaatgaattattgacaaatgcagtaacttggatgaatctccaggtaattctgctaagtgagaaaagccaatccctaaaggtcatagactatataattccttttgttccacattcatgaaatgacaaaattatagaaatgaagaatggattggtggtttccaggggtcagggactggtgggcaggagtcagggaagcatggctatgaaaggccagcaggagggagccttatggtgatgaacgtgttcaggatcttggctgtactaatgtcagcttcctggctgtgtatcatactacggctttgtaatatggtaccataggtagtaagctgggtaaaggatgcacagagtctttctgtacttattttttaaaactccatgtgaatctacaattatcttaaaatggaaagtttaatttaaaaaataaccttgcaaataaaaggggaaaaccaaagcgtgtgtaacaccttccctgtatgcatgctttctcagtggaaccacagaactgataagggaaattttctttttatggacatattccagctgacaaatttgatgggactggaatatccccatgtgtcaccttctgtgaggtgacagatctttacatgatcattgacagctgctgacatcacataataaggccttatgaacctcaggcagcaccacctctaaagcagtcttgccacaaaacatcaaacctggacctgatcaagcatctggattgattatggatatagatggacatagagaaaatatggatatggatatagagaaaatgcaggagacagacgagcaagggaaatgtctctgtgggacaaaatccacaaaatccagattgttggaaactctccaggacaaaagatctagattcttcaaaaacaacaacattgagaaaagaactgccagaaagaaaaaatacagaaggagaagataaattaaaagaaacatgagttatgccagccaagtacaatgaatggatctgttttggatccaggtacaaacaaactgtgtaaaaattttagaagcatccatatgacagctgagaaaatttgaacactgacttagtgtttgatgttattaagaaatttttaatattttagaggtgaaaaattgtattgtgggtataattttttaaaaatttgatatttgaaatttttttgtagatatatattgaaatatttatagatcaaattgtaaaaatctgaggtggccattcattcgtaattgttgaagctgggtgattagtacatggggggttactatattaggctttctacttttgtatacatttgaaatctattgtaaaactattttagaaaatataaacaaagtaatctaatattccccatgttggcctctgcaaaaataatatctcatgtaacttgggaagcttggatatttttatgcatggcataaaaatgacaatgtacatccctctcccctcaggacacagaacacatttgtgagtcttttcaccctcatctcgttggagattttattgggcaaagaaccttcagtaggcacgaaattcattctcacaagcagatggatacgttatgctccatttattgctcatcctaaattacaaacatttccagtgaatggaaaggaagatatgattgaaaaggactctataaagacaggatgtttctgtacagtcctcgtatctgctcacctattccaaactttccagacattttaccagaggtttaagacattctcctgagggtttgttgtagagggatttttcttaaataaggagtgcaagtagcaagcaatagcccacccaattggagataaaaaaaaaaagagtgtcagttttccccagtgttaaaaaaacaaaaaaggcatcaccctgcacatccctggcaattatacaaggggatgtacacagcccccacctttcctgagttcaaaaggaaggtgggttctgaaagaagaaaaggaagagtagatctctttggatctcttgacactcacagcaaagggattaaggtatctgagtcaactcttgaggcttctttgaattcagggatgaggagagaatatggtaagcttgacatcaggtcccagaagttttgagagaaaagaacagattgctctttgcaaaacaaaccaagtggggtgcatggagccccagtgaatgggaaacagagaagtcatcataccatgaaatggtctgaaatgtcaggtgcaccatcccttgtgagtaccaaatctgtgctccgcataaacttcttcacccagagtcaactggcaggggcaactggctcaccaggagacctagctatcctcttctccaggccctaattacacctccctgcaacagggactctgccatctaacagacaaggaggtgatttggttcccacatgtggctttttctgctgggtcccttgaggtccatggtaaccttttccccattctccataggccacactttatcataagattggaggcagagaacttcagcaaccacccccttgccctctggccctggggtcagggttactcaaacaatacctgctgcccaaacctggagaagtgtagattttgccactgatggaaggataatagctattgttgatacttaatcttgggggcctagaattcccactgttttcacaactcggagcttatttctaccagccctgtcagtgaggataaatgggcatgaataatgagcagaccagtttcccaaaagctcagacagtctgcagggaacatgtaatgagcagacagtgcagttcatgccggggagcccaggtttatccaggcctcatcctcactacctttctctactgataattggacccaacaggaccattctgagtcatttttccctcttcatttattcttcagttccactcaaaaggtcagcttagggcataaggtcaattaccttctgcaaggcaatcaggacaacagttacagaaaatgatagcagccttactcttcctgtaggaattaccagcttgtcagcctccaagctcatggagacaaagcatcgaaaagttagatccaggtgctcacctatgtgttcacttattctgtgtgtgtgtgtgtgtgtgtgtgtgacatttgttgtaaacgagagggcaggagtcagtgacacagtggtgcagagaataatcatattccctgccttcatggggcacagggcttggtggaggacaaagatgtgaattcagtaagtgccccaataaatattctcctacagttgaagaaaggtgatatgatgtaatgtgcaacagagacttttacatggtggggccctggcaggtctctctgaagctgaaactggcaggatgagcaggagttcacaagacagagaggggtgaatgtgttttccaaccacgtcttagcacaaactgttctctttgctgagagctgaaaaaagacagtgtgaccagagaccatcaggtaaggagctgaacatgagatatgacctgaacaggtggaagaaggtggtgagagacaaagaaaggagtacggtgcagtagagagggcacagaagctgatgtcagggtgtctcagtttggaaccactggcagccctgctcctctcccatgtggtcccaccatggtctctagggtctgggataagaggttaatgtgtacctcataccctaagtaggggtggtccctgcactttggcaaaaagttaaggaactaaagagatggaaatgaaaaaaaagataggatgaagacttaaaagaccaaagcccttggatgttttcttttttaatttttattttttaattttttatcaagacaagatctcactatgttgcccaggctggactcaaccttccagcctaaagcactccacccaccttggcctcccaatgtgctgggattacaacatgagtcaccatgcccagcctcctgggatgtttctcaacaaaacactgaacgccaagactggtttttgtgccacgtgccaacttcacggaagccagtctatgagctaccagctgcactcagcaattccagctccccaagctttggctcaattcccgtagatgcaccactgcttgtggcctgactctttgccacccaagtgcactcagcctcccctggggagtctgccaggcttgcatggctcctactacacttgctgtgctgggacctaaaacagtttttgtgcccctagcttgactccactgtatttatggaggctttgacctcctcagtggctgccctgggacagggaggctggttagcacaattaacacaacctggtcatgcaaggcattggtagtccataaggtgaactttgaccagtgagagacaggaaatggaaagaagccaacagaaaaatcacctggccttcctcccctatgacagagtgttctgagccacagtgttttacatgtcctccctggagatgtcccacatgacttgagcaaccaactggagctctggagaaactgcagccatgctgataacatatgaccttgtatttgctttctctccttcctgctttatttccctatgtcccttactttggttgttgggattgcacctcccaataaagcattagcatgtccgctctgcttggggctctgtttcctgggttaagactctgactcttgaatgctgaggcattgtattgagaaggagtccatgctggactcacacctggtgaacaagagtgctgtggtgcatgagtgagttcttccaaaggtataagaaaagatactcagtacctgtcaccccgaactattcttctgcagcaaatatgtgtttaaagtcagcagcccttaaacatacttgagatcacagatgaagcaacatcagactagctcccaacatagaaaagcacaataggaaagaaatatttggtgctgaaaagattatagctatgagaaaattaggcaatccctctgtgagaaccagcatgcactatggtaaaggttgaaaacagaagcgtggatacaattgcttaatagatataataatatgcataactgtgtgacaggcagtgtactaacaccctcatctttcatcccatttgctcatcaaaatagtaataaaaaggcatgcactttttttttttttgacaaagtcttgctctgtcacccaggctggagtgcagtggtgcaaattcagctcactgcaacctctacctactgggttcaagtgattctcatacctcagcctcccaagtagctggaattacagctatgccaccacacctgcctaattttttgtattttttttttttttttagtagaggtggggtttcgccatgttggccaggctggtctctaactcctgtcttcaagtgattcgttcacctcggcatctcaaagtgctgggattacacacatgagccactgcacccgaccaggcatgcactcttacaaacccttattttacaggcaagaaaacagggccagagaagttgggtaactagtccaaggccacaataagagtagcagagtcaggcttggagcccaggaagtatttcttcaagtttcatgcttctaacctgagtgctgtactgcctggtggagctctctgctaatcctaactttcaggcagaggtaagcattgctgatattatatgcctgttcctgagggctaataccaggagggagatcagacttttctgtctgatctgttgcttgtcccttccatgagtcttgggatcagaatcctgaattagagagagatggactctggccaaggtaggtatgatggtttgtatgtgtcccccagaaagcacgtgttggaaactgaatccccaacacaacagtgtcaggaggtggcgcctaatgagaggtgtctaggtcatggaggcaccacactcatgaatggattaatgtccactataaagaacttgaggctgtgagttccatctgttgctgtttatgtcttttgccctcttgccttctgccactggatgatttagtgagaaagctgccaccagatgcagccccttgatcttggactgcccagcctctagaaccacaagccaattaaattttttcttcataaattacctggtctcttgtattctgttatagcagcacaaacagtctaagacagtaagacagtagggaaacgagctccagatgtacttgaagcctctcgttcttattttaggaattaaagagcaatctccaccagtttccattagaaatgcttcttcttccatatcaaatattgtgggatagcctgaaacacctctcaatacttcatgacccttctccaaaattcaacagatatgatttctatggactttactcacaggggctccagtagaagaggaagaggcttgggtttaattgaaggtggcctcaggcatcagtgaggagcagctcctttggagacatatctcctacaaagaaagcatcagaattattatcctaatatgtggacatttgcggttccttcagcaccatcgaaatgaaaagaccatggggagatgcagggagagggctctgcacagcatagccaacttgtcaggttgaagacagacaacctccacggagcacggacttcaattagttaattccccacccccattgtcacttactaacatgggatgctgattaaaaattagattctcagattatctgtgagaagcttcacttataatttaagaacttttgctgtacaaccattgcaaaataattacataaagattaattagcaaattcccaaagcagtagtaaacagcaaagtagtttaattaagaccattatctccaaaatctgaacgttaataacagttgtagcccagagagaaatatgaggcacactggcacagagtggggtaaagggaggatgtcctttgacaccaacagtcggcccaagtctccacagctgctgtcctgctaattaaactccagaactctctggccactgcatcttgagaggacctgggctcctcctatgagcctctgcagctatagccttgacaaacatgtcattgtcggcctgcctccaagaacaggcctttacccctcaggagagagggaggaagcagggggagtgaacaagactttctagtggggaattcataaaatttagaatcgtcagaaaacatctgtaaccatgactcctgtctttcagaagacactgataaatttaacccaaccccttaacacaaactctgaagtaaaagtttggcaaaggaagccagtgggaatgaaatgtaacaatagcaactatgcagtcagcacacacaccgtacgatctcacacagtcaccagatcctctcgaagccacactgccttcattctgttattatttattcatttatgagacagggtgtcactctgttgccccagttagagtcagtgacacaaggtagtgtgcagtgctcagtgcagcctccaactcctggctccagtgatcctcctaccccagagtcccaagggactgggactacaagcacgagccactaagatcagctaatggtttttaatttgtgtgtgtgtgtgtggagacagggtctgactacattgcccaggctggtctcaaagtcctagcctcaaatgatcctcctgccgcagcctctcaaagtgctgggattacaggcatgagccactgtgtgctgccatattacctttattcttaagccaaagtcactcgcttagcctcgcacatggagagccttctcttttcaactctaaagcccatttgtttacctcgataccacagagatgccctttggtggtgcaacatttagcccattgaaggtggagactcaccattgtgtgagtctggtgtgaggtatagcctagacttgacaaagattgatttctccaaagaacccctttggcagggagatcccaaatcagagagcccttaccctcacccgggacagccaatgtctgtgcagctccacacggagcaacagctactgtggagaggttgacctggaccaatctaggacaggctgaggactgcccctccccaggcccttccatgtgtcagttcctgtcacaggggagggtgtggaagccacctctcatcagagatccacatcagctcatgcacctggctctggtgctgtcccacctcaggatcattccactttctgctgcagggccttgtctgatttcacaaagacctctaggtccacactaagagacagcccagaggtatggggtaggtgtttacaatggaggtgttgacagtcatcctcatcgtggaagccaccttctgactcactgcacccatcccagccatacctcctcatccagcggctatatgtcgatttgtctctcccctaatacaaggccctgccctccaccagcagagccagactgtctgcctgcaagcctggctttttattctgctgcactcagaaattacgcaaatcacaactattagtataacagcttctgcagaattcacaaagaaaagggaaaaaaaacactgtcacaaaatccctgtgcttggttaaaagaccgttaatttccccattatcctcactcactctcttgttaatatgagatgtgtgcatctgaagcctgcttttcagtcatatgaacatctataaaagagacatcagtcagcagaaacctctggaactgcaacatgaaagagaatgagggaaaagcccaactccagctagggtggagaagagaagaaaggcgagatgtgggaggtggccctggaaggcctgggcgggggtctctagaggaacctgggaagactctggtgtgggacaaagctccagatggactctgagcactctcgctgtcctggaggacagctgtctcactgttctggagggcctcattccccttctcattcatctcactcaccatgctagaagcctcccaagggcaagagctgcacacctgcacacctgcgccccatcccctccacagccctgagcaatgagcaggcacagagccagggcccggggaggccatggagaaattgagctcctttgcttgccatcatttcagagagaccacagtagtcttattccctgtgaatggattgagtttcttctatcaatcagggtccccaaaggaacaggtggcacatggacatcagaggattcaataacctgacaatttgcaaagatttcggcggaacagtgacagcagagatgaaggagcacatgatcccaggtgctcagaaggaggaagctgcctcgagagcagggactcagtcagcccgagcaacccagcagggaggacgcaggaggaatcaaggccctgtctccctcctcactccgtctgccttcctcccaagggccccctgggagctgagggagtagaggcaagttagccacctgggccatgcctccaggtcccctcctgaggcacagagcaaggcagaaaagcttctgggccaggctctggcagcaccagttggatttcctctgtaagatgaagacaatggtcctgggagagcacagctgaccacctagcaccctgggccatgtcaccttccagctcacctctcatctgaggtccacaccagcttatgcacctggctctggtgctgtcccacctcgtgatcattccactttctgctgtgaggctctgtctgatttcacaagagaactctaggtccacaataagacagcccagaggtatggggtaggtgtttacaatggaggtgttgacaatcattctcatcgtgcaagcctgggcattcagaggcattcatattaggcctagcccaggtgttcacagccattctcatcagggccagcccaggtgtcgctgctatcctcactaggcccacctcagatgttcacaactgacctcattgggcccatgcaggtgttcatagccatcctcatcaggacgagcccagggttcatagctgccctcaccgaggtttgtttatattttcatataacattgtgaaaaactggcttggggccactgagtatagctgtgatcacctgagtttggcccaatgaggacagctgtgaacacctgtgctaggcccaatgaggacagctatgaacatctgggctgggccccaagactacagctgtgcttattggaccctgatctggtgctcttagccatcttcattgagaccagcctaggtgttcacagcttttctcattgggtccagcccagttgttcatagctattctcatcagggtcagcccaggtattcacagctggccatggagctcagccaagttgttcacagctgtcctcatgagacccagcctggtgtttaccaccccctccctgagttcagcccagttttttacatccatcttcactggggccagcccaggtattcacagctgtcctcattgtgccaagccaaggtattcacagctgtcctcatgggggccaggtgaggtactcacagctgttcctttcaaggccaacccaggtgtttactgctgtcctcattgtgtccagcccaggtgttcataactgtcctcatggggttcaggtgaggtgttcacagtgatgctctttggagccagccaaggtgttcacagccatccacattggcttcatccaagatgttcatagccatccttattggagccagtgagtttgttcacacccatgctaatacgtgtcaaccaaggtattatagctacactcatctgggtgagccaaggtgttcactgctatcctcactggggcccagcccaggtgttaatagttgtccttatgggcccagcccaggagtttatattggttctcatcagggcaagtccgggtgttcagtgccatcctattgggccctgacctggtattcagagccatcctcactactccagcccaggtattcacagtcgttctcatcagggccttgtacgtgtgctcatagttgtcatcattaggtgtttatgggtaagtccaggtgttcagagccatcctattaggcccagtttaggtgttcagaatcatccttgtggtgcctagcctagaagttcccagctgtaattatcatagtcagccagggtttccacagtcatcctcatcaggaacagccgtggtgttcacatccatgctcactgggcctagttaaggtattagaaccatcttaatcatcagggccagatcaggtggtaatggcagttctctttagtgccagcccagttattcatagccattctcattggaaccagataatctgttcacaaacattctcattggggccagccaaattatgatagccatcctcatcagggccagctcatctgttcacagctgtcttcaccgggggcagcataggtgttcacagccatcctcaatgggtccagccaaggttttcacagctgtcctgattgggcccaccccagaggttcacagctgtcatcataggacccagcaaagaagtacacagctgttctcattgagctcagcccaggtgggccagtgccaattagtgtgactataataccttgcctggacccaactagcatgggcaggagcaaattggctgaccccagtgaggatggctatgaacatctgggttggtggcagtgtggaaaaatatgaatatcttggctggccccaaagagaaccaccgtaaacatctagacaggccaaaatgaggaagttttgaagacagccatgaactcctgggctggctacgatgaggacagttgtgaacaactgagctgggccaaattaggacagctgtaaacactcatgctaggctcaatgaggacagcagtgaacacctatggtggccaatgaggtcagatgtgaacaactgggttggcccaataaggacaacagtgaacacttggcttatccgcatgaggacagcttggaacatccgagctgatcttgataaggactactgtgaatacatagactgaacccaataacaacagctattaacaccttgactagttccctatgagaaccactgtggacacctgggcttgcccccaatgaagatagctatgaacacttgggctgacctcaatgatgacaactgtgaacacctttgctggcactgatgaggaccattgtgaacatgttggcttgcagtaatgaggacagatatgaacgcctaggctggacccagtggaaagagaagtgaacacctaagctgacccaacaatgaaaattgtgaaaaactggcttggagccactgaggatagctgtggtcacctgagtttggcccaatgaggacagctgtgaacacctgggctaggcccaatgaggacagctatgaacatctgggctggtccccaagactacagctttgaacaaatgggccgaccttgatgaagatggctgtgtacacctggggtaggcccagtgaggacagcaattaacacttgggctttgcctgtatgaagtaaactgtgaacacttgtgctgactccaatgagcctggctgggaagacctgaactggccccaatgaggatggctataataccttggctgggcccagtgaacatagatgtgaacacttaggcaggccctgatgaggagcactgtgaacacctaggctggtcctaattaggaaaactgggaacacttgggcagggcccagtgagaatgggctatactcagtgatgaaaactgtgaagaactggcctggatcctgtgaggacgaatatgaacacttgagcgtggaccagtgagaaaggctttgaacacctgggatggccacaatgatgatggctgtgaacaccttggctggcctcagcgagtgttgctataatagcttggctggccccaattaacatgggtgtgaacaaataggctggacctaatgaggatggctgttaacacctcaggtgtctcagttgaggatcactgtgaacacctgagcaggctcagatgaaaatagctatgaacacctaggctggtcctgatgaagacagctaggaacacctgggtgaggcccagtgaggatagctattaacacctggctggctttcatgaggatggctgtgagcacctggtctggccactattaaacagtctctggacacctaagctgggcccaatgaggacagctattaacacctgggctggcccaataatgaccgttgtgaacactaacccagataaggatggctatgaaaatttgggctggcatctaggtagatggctgtgacctcccaggctggccccagtgaggatggttctaattctttagctggcctaaaagagcatggatgtgaacacctgggctggtcctaatgaagacaactatgaatacctaggataacccccaataaaaacagctgggaacacctgggatggccttcattaggaagtctccaacacctggactgggcctaataggatggctctgaacacctggacttgccctggtgaggacctctgtaatcacagtgctgggcccaatgaggacaactattaacacctggtctgaaaactggtgaggagtgctctgaacacttaggctgaacctgaggaggatggctgtaaacacctgacctgacctcaatgaggacagctgtgtaaaactgggattgacctagtgaggacagctgtgaacacgtagactgatcctactggggacaatggtgaacatctaggctaagcccaatgaagatagctctgaatacctggacatggctcctatgagataaagtgcaaatgcctgggcttgcccaatgtggacagctatgaatacctaggctgagctcaattatgaaagctgtgaacacatgggcttggtccagtgaggacagtggtgaacactcaggctggccctcatgaggacagctgtgaacactttgtctgggccccatgagaacagcagtgaatacctgggctggccaaaataaggtaaaacaactgagctaaacccaatgagaatggctgtgaacacctaggctagacaccaagaaaatagctttgaacacatgagctgagctccattaggacacctgtgaatacttggcctggcaccagtgaaaacagctatgaacaattgggctaggctcagtgaggatggctataaacacctatgctgaactccatgagatcagctgtgaacacctggctataataccttggctggccccaattagcatgagggtgaacacattggctggccccaagaagaatgactatgaacacctgaactggcaccatgtgaatggctgtgaccacctgggctggcaccaatgaaaacagctgtgaacaactaagctaggcccaatatgaatggctctgaacacccaggcttgcacaataaggatgactatcaacacctccattagccccaatgaggatggctgttaacacctgggctggctctgataaggacaactgtgaacacccagcatgagcccaataagaacagtggtgaacacttaggctaggccaaataaggtcagccgttaaaacctgggctggccacagcaaggatggctgtgaaaacctgagctggacccaaaggaaacacctatgaaaaactgggttgtggggtagctggcaagatggccgaagaggaacaattccagtctgcagctcccagtgagatcgacacagatgacagatgattccttcatttccaactgaggtacccagttcatctcattggtactcgttggacagtgggtacagcccatggaaggcaagccaaagcagggtggggtgttgcttcatctgggaagtgcaaggggtcaggggatttccctttcctagccatgggaagccttgagagactgactgtaccaggaggaatggtgcattccggcctggatactgcacttttcccgcagtcctcaaaaccagcagaccaggagattctctcctggctgttttcattaggggttatgctaggtattcatagttgtcttcattgggaccagcccaggtgttcacatccatgctcttttaggccagctaaagaattagaaccatcctcactggggccagcctgggaggtcacagccatctacctagatgccagcccaaattttcatagccatccttatctgggttagtgttcacaacggtcattattgggccagcccaggtgttaatagctgtcctcattgggcccagcttaggtgtccagagactgtttaatagtggccagaccaggtgctcacagccatcctcatgaaagccagccaggtgttaatagctatcctcactgggcctcacccaggtgttcctagctgtcttcatcaggaccagcctaggtgttcatagctattttcatctgagcctgctcaggtgttcacagtgatcctcaactgagacacctgaggtgttaacagccatcctcattgggtccagcctggttcagtgggttctaccccaacagagctcaacaagctaagatccactggcttgaaattctcactgctccacagcagtttgaggtcaacctgggatgcttgagcttagtggggggaggggcatccatcattgctgaggcttgagtaggcggttttaccctcacagtgtaaacaaagctgccgggaagttcaaactgggcggagcccactgcagctccctgggacaaaacacctgtgggaagactgtgggtacagcttcaaccgacttaaacgtccctgcctgacagctctgaagaaagcagcagttctcccagtacagcgttcaagctctgataagggacagactgcctcctcaagtgggtccctgacctccaatgtgtccagactgggagatacctcccagtaggggctgacagacacctcatacaggagcgctctaactgatatctagggggtgcccctctgggatgaagcttccagaggtaggaacagggagcaatctttgttctgcagcctccactggtgatacccaggaaaacagagtctggagtggacctctggcaaactccaacagacctgcagcagaggggcctgactgttagaaggaaaactaacaaacagaaaggaataatatcaacatcaacaacatcaaagacgaaaggtagataaatccacgaagatgacgagaaaccaacacaaaaaggctgaaaattccaaaaaccagaacgcctcttctcctccaaagtatcataactcctcgccagcaagggaacaaaactggacaaataataagtttgacgaattgacagaagtaggcttcagaaggtggttaatgataaactcctttgagctaaagaagcatgttctaacccaatgcagagaagctaagaacctggataaaagtttggatgagttgctaactagaataaccagcttacagaagaacataaatgacctgatggagctgaaaaacacagcacaaaaacttcttgaagcatacacaagtatcagtagctgaactgatcaagtggaagaaagtatatcagagattgaagatcaactcaatgaaataaagttagaagacaagattagagaaaaaagagtgaaaagaaatgaacaaagactccaagaaatatggacaatgtgcaaagaccaaatctacatttgattggtgcacctgaaagtgacgaggagaatggaaccaagttggaaaacactcttcaggatattatccaggagaacttcctcaacctagcaaggcagaccaacattcaaattcaggaaatacggagaacaccacaaagatattcctcgaaaagagcagccccaagacacataattgtcaggttcaccaaggttgaaatgaagaaaaaaatgttaaaggcaacctgagagaaaggttgagttacccacaaagggatgccaatcagactaacagctgatctgttggcagaaaccctacaagccagaagacagtgaggggaaaattttcaacattcttaaagaaaagaattttcaactgagaatttcatatccagccaaactaagctccgtaagtgaaggagaaataaaatcctttcagacaagcaaatgctgagagattttgtcaccaccaggcctgccttacaagagctcctgaaggaagcactaaacatggaaaagaacaaccggtaccagccactgcaaaaacataccaaattgtaaaaagcatcaacactatgaagaaacttcatcaactagtgggcaaaataaccagctagcatcataatgacaggaccaaattcacacataacaatattaaccttaaatgtaaatgggctaaatgcccaaagacacggactgggaaattgaataaagaggcaagaccaattggtgtgcccatctcacatgcaaagacacaaataggctcaaaataaaggaatggaggaagatttaccaagaaaatggaaggaaaaaaaaattaagggttgcaatcctagtctctgataaaacagactgtaaaccaacaaagatcaaaaaatacaaagaagggcattacataatggtaaagagatcaatgcagcaagaagagctaactatcctaaatatatatgcacccaatacaggagcacccagattcataaagcaagttcttaaagacctacaaaaagctggagaggatgtggagaaataggaatacttttacactgttggtgggactgtaaactagttcaaccattgtggaagtcagtgtggcgattcctcagggatctagaactagaaataccatttgacccagccatcccattactgggtatatacccaaaggactataaatcatgctgctgtaaagacacatgcacatgtatgtttattgcggcattattcacaatagcaaagacttggaaccaacccaaatgtccaacaatgatagactggattaagaaaatgtggcacgtatacaccatggaatactatgcagccataaaaaatgatgagttcatgtcctttgtagggacatggatgaaattggaaaccatcattctcagtaaactatcgcaagaacaaaaaaccaaacaccgcatattctcactcataggtgggaattgaacaatgagatcacatggacacaggaaggggaatatcacactctggggactgttgtggggtggggagaggggggagggatagcattgggagatatacctaatgctagatgacgagttagggggtgcagcacaccagcatggcacatgtatacatatgtaactaacctgcacaatgtgcacatgtaccctaaaacttaaagtataataataaaaaataaataaataaataaataaataaataaataagacctacaaagagacttagacgtctgcaaaataatagtgggagacttttacaccccactgtcaatattggacatattaacgagacagaaaattagcaaggatattcaggacttgaactcagctctggaccaagtggacctaatagacatctgcagaactctccactcgaaatcaacagaatatacatttttttcagcaccaaatcacacttattctaaaattgaccaagtaattggaagtaaaacactcctcagcaaatgcaaaagaatggaaatcataacagtctctcagaccacagtgcaatcaaattaaaactcaggattaagaaattcactcaaaaccacacaactacatggaaactgaacaacctgctcctgaatgactactgggtaaataatgaaatgaaggcagaaataaagatgttctttgaaaccaatgagaataagacacaacataccagaatctctgggacacatttaaagcagtgtgtgagggaaatttatagcactaaatgcccacaagaaaaagcaggaaagatctgaaattgtcaccctaacgtcaaaattaaaagaagtagacaagcaagagcaaacaatttcaaaagctagtagaggacaagaaataactaagatcagagcagaactgaaggagatagatacacgaaaaacccttcaaaaaatcaacgaatccaggagctggttttttgaaaagatcaacaaaatacagagactgctaagcagactaataaagaagaaaagagagaagaatcaaatagatgcaataaaaaatgataaatgagatatcaccaccaatttgacaaaaatacaaactaccatcagagaatactataaacacctctatgcgaaaaactagaaaatctagaagaaatggataaattcctggacacatacaccctcccaagactaaaccaggaagaagtagaatccctgaatagatcaataacaagttctgaaattgaggcagtaattaacagcctaccaaccaaaaaaaagcccaggaccagatggattcacagccgaattctaccaagggtacaaagaggagctagtaccattgcttctgaaactattccacacaatagaaaaagaaggaatcctccctaaactcattttatgaggccagcatcatcctgataccaaaacctggcagagatacaacaaaaataaaggaaaatttcaggcccatatccttgatgaacatcaatgcgaaaatcctcaatcaaatattggcaaacccaattcagcagcacatcaaaaaggttatccaccatgatcaagtgggcttcatccctgggatacaaagctggttcaacatatgcaaatcaataaacgtaatccatcacataaacagaactaattacaaaaaccacataattatctcaatagatgcagaaaaggcctttgacaaaattcaacagcccttcatgctaaaaactctcaataaactaggtattgatggaaagtatctcaaaataataagagctatttatgacaaacctacagctaatatcatactgaataggcaaaaactggaagcattccctttgaaaactgacacaagacaaggacgccctctctcacttctccttttcaacatagtattggaatttctggccagggcagtcagacaagagaaagaaataaagggtattcaaacaggaagagaggaagcatattatctctgtttgcagatgacatgattgtatatttagaaaaccccattgtctcagcccaaatctccttaagctgataagcaacttcagcaaagtctcaggatacaaaatcaatgtgcaaaaatcacaaacactcctatacacaaataacagacaaacagagagccaaatcatgagtgaattccagttcacaattgctacaaagagaataaaaaacctaggaatacaacttgcaagggatgtgaaggacctcttcaaggagaactacaaaccactgctcaaggaaataaaagaggacacaaacaaatggaaaatcattccatgctcatggataagaagaaacaatatcgtgaaaatgtccatcctgcccaaaataatttatagatttaatgctatctccatcaaactaccattgactttcttcacagaattggaaaaaaactactttaaacttcatatggaaccaaaacagagcccacatagctaagacaattctaagcaaaaacaacaaaactggaggcatcatcctacctgactttatactacaaggctacagtaaccaaaagagcatggtactggtaccaaaacagatatatagaccaatggaacaaaacagaggcctcaaaaataacaccacacatctacaaccatctgatctttgaaaaatctgacaaaaacaagcaatggggaaagaattccctatttaatagatggtgttgggaacactggaatgcagaaagctgaaactggatcccttccttacaccttatacaaaaatttattcaagatggattaaagacttaaacataaaacctaaaaccataaaaaccctcgaagaaaacctggccagtacctttcaggacacaggcattggcaaagccttcatgactaaaacaccaagggcaatggcaactaaagccaaaattgacgaatagaatctaattaaactaaagagcttctgcacagcaaatgaaactatcatcagagtgaacaggaaacttacagaatgggagaaaatttttgaaatctatccatctgacaaaggactcatatccagaatttacaaataacttaaatttacaagaaaaaaaacaaacatcctcatcaaaaagtgggcaaaggatatgaacaggcatttctcaaaagaagacatttatgcagccaacaaacatgaaaaaatgctcatcatcaatggtcattagagaaatgcaaatcaaaaccacaatgggatatcatcttgtgccagttagaatggcgatcgttaaaaagtcaggaaacaacagatgctggagaggatgtggagaaataggaatgcttttacactgttagtgggagtgtaaattagttcaaccattgtggaagacaatctttgttgttctgcagcctccactggtggccattcctcaaggatctagaactagaaataccatttgacccagccatcccattactgggtatatacccaaaggattataactcattctactgtaaagacacatgcacatgtatgtttattgcagcactgttcacaatagcaaagacttgaaaccaacccaaatgcccatcaatgatagactggataaagaaaatgtggcacatatacactgtggaatactatacagccataaaaagggtgagttcatgtcctttgcagggacatggataaagctggaaaccatcattctcagcaaactaacacaagaacaaaaaaccaaatactgcaagtgggaattgaacaacaagaacacatggacacagggaggggaacattatgcactgaggcctgtgggggggtggggggtgaggggagggatagcattaggtgaaatacctaatgtagatgacaggttgatgggtacagcacattctgcacatgtaccctagaacttaaaacaaacaaacaaatgaataaacaaacaaaaaaaaactgggttggacacaaggaggatggctgagaacacctgagctggccctgatgagaatggatgtgatcacctgggctgccctgatgagggtggccctacgatattggctgcacccattgagcatgaatgtgaacacctaggttgtccctgacaaggaccacagtgaacacctaagctgcccccgataaggaaagcctggtctggcccccatgaggaaggctttgatcacctaggaaaggcacaataggatggttgtgaacacctgaagttgccctgagatggacctctatacaactatgtttatagtcatgaaaacatgtgaactataaacatgtgaactgggtcagagaagtatcacggtgaacacttaggctggacccagtgaggagagctatgaacccctggcctggcacaatgagaatgtctatgaaaacctgggctttgcccagagaggacggctgtgaaaacctggattgacccctaagaagaggcttggaacatgttggctggcctgcttgaaggcggctatgataccttggccagccctaatttccatagctgtgaacaggaggactggccctgatgaggatggctatgaacatttgggatggtgataatgtggattgttgtgatgggctgagctggctcaagtgaggaccactgtgaacacctgcaaaggcccagataagaacagctatgaaaacctgggatgctcccagtggagacagctatgaacacctgggctgggctgagtgtggacaacagtgaagacctgggttagctcagatgaggacagctatgaataccctgccaggccccgatgagggtgaccttaataccttgattgacaccagtgatccacattaggacagctgtgaacacttgtgctggacccaataactacatcagtgaacatttcttggggctggaccagatgaggacaattgtggacacctgggctgggctcaaaagaataactgtatattagggctgggtataacaaagacagctttgaacatgtgggctgtaccctatgaggagagctttgaacacctggactgacacctattagaatagctgtgaatacctccactgggactaggtctctatatgaactactttgtacacctgtcctggcccaatgaaaatagcactaaacatttacattggccctcatgaagagatctttgaacacctgggctttctctgatgatgatggctgtgaacacctgggccatcctcactgggcacagccaagtttttcatagctgtcctaactgaacccagcctaggtgttcacagctgtcatcattgggtgtaacctgggtgttcacatctacccttatttgggcctagcccaggtattcaaggtttcctcattgggcccagcacaaacatacacaactatggttgtgggcccagccctggtattcatagccattgacatcggggccagcccaggtgtacatgaccattctttccagggccagctaaggtgttcatggctgtcctcatggggccagcccaggtgttcacagctgttctcataggtcctatcccaagtattcactgctgttctaatgcggcctagttcaggtgttcactgctgccctcattgtacccagcccacatgatcacagatgtcctaatagggcccagcccaggtattcactctaaaacctggccagggcccaatgaggacagctgtgttcatctaggctgggccccatgaaggcagcctggaacccctggcttgacccagggaggattgctgtgaacacctgggctgccccaatgagggtggctatactataggttggctggccccaaagatcatggctgtgaacacattggctgatcctgatggggatggctatgaacacctgggctcagcccaatgaagatgacgacaaacaccttggctggccccaatgagaatgacaatgaacaatttcctgggccaaaggaggacagctgtgaacacatgaggttggcccaatgtggacaggagtgaatacctggttgtcctagatggggacagctgtgaacacctaggcttgcccacattaggacagctatgaacacctgggatgggcccagtgacactagcagtgaattcctcagctggatttgacaaggatggttatcaacacctggactggccccaacctagatggctatgaacacctgggcatggcccaaaagcttaactgagtacatctggcctgggcacaatgaggaaaactttgaaacatctgggctggtccctgtgaggacagatttgaacatttggacttaccctgatgaggacagctgtgaatactttgactggccctgaagagaacagccatgaacacctggcctgggcccaaggagaacagctatgagaaaacctgtgactggccaagaaaggaccactgtgaacaccttgcctggtttcactgagggtggtatcctatttgggctggccccaattagcatgagtgtgaacaaattggctggctccactaagaattgctatgaacatctgagctggtgctaatgtggacagctgtaaccacctggattggccccactgaggaccaaatgtacatttatccttttgggcccagcccaagtgttcatagccacctaagctgaggctaccccaggtgttcataaccatcctcatcaggtccagccccttgaggtgttcactgctatagtcattgggtccagcccaggtgttcatagccgtcctaatgtggacaggcccaggtgttcacagctgttctcatctgggacagccaggtattcactcctattcacattgggtcaacctcacgtgtttacagctgtcctctttggacccaggaaattgttcattgccattctcattggagcttcccagatattcaaagccattctcatcaaggcatatctggtttttaaagctgtctgcattggccctgacaaagtattcacagcttttaaaatattggccagtgcaggtgttcacagctgtcctcattagagccagcacaggttcttacagccatcctcatccgagccagcccaggaattttcagtccttcacatggggacccagtccagtgtttaatagttgtcctcactgggctgagcccagatgttcacagccatccaaatactcattagggcaagtccagatgttcagggccatcctattcggccctgccctggtgttcagagacatcctcactggcccagcccaagtcttcacagtcgttatcgtaggggacttgtacatgtgttcatagctatcatcattaggtgtttatagtggttttcatctgggtgagtccaggtgttcagcactatcctattgggcccagttcaggtgttcagaaccatcctcaagatggctaccttaggtgttcccagctatacttaccatggccagcctgggtttccacagtcatccttatcaggaacacccctggtgttcacatccatgctcactgggcctagccaaggcattagtgccatcttcatcattgaggcctgaccaggtattagggcagtttattttagtgccagcccaggtattcatagcgattcttatcgggaccagccaatgtgtttacagacctcctcattgggaccagccaaattattatagccaccctgatcaaggccagccaatttgttcacagccattcttctcagggtcagccaacttgtttacagctgtccaatgggcaacctaggtgttcacagctgtcctcattgtgcccagccaagatttttatagttgccctgattggacccaccccagagggtcacagctatcatcataagacccagctcagatgtacacagctgttctcattgggctcagcccaggtgggccagtgccaatgagtgtgactataataccttacctggacccaattagcacgggcaggaacaaattggctgatcccagtgaggatggctatgaacatctgggttggtggcagtgtggaaaaatatgactatcttggctggccccaaagagaaccactgtaaacatctgggcaggtctagaagaggaaagctctgaagacagccatgaactcctgggctggctatgatgaggacagttgtgaacaactgagctggaccaaattaggacagctgtagacactcatgctaggctcagtgaggacagcagtgaacacctatggtggccagtgaggtcagatgtgaacacctgggctggcccaataaagaaaataataaacacataggcttgttcccatgagggcagctttgaacacctgagctgatcttgttgaggacaactgtgaacacataggctaagccgtataacgacagctattaacaccttgactaggcccctgtgagaaccactgtgccactgtgaacaccagggctagcgccaatgaggatggctatgaacacttgggctgaccttgatgatgacaactgtgaatggtaccaactttgctggcactgatgtggaccactgaaaacatgtcagcttgtagtgatgacagatgtgaatgcctaggctgggcccattaaagagatcagtgaacacctaagctgacccagtgatgaaagctttgaacacttggcctgaggccaatcaggatagctgtgatcacctgagtgatcgcaatgagtacaaagctgcccaatgagcacagctttgaacaactgggttgaccttgataaggatggctgtgcatacctgggctgggcccagtaaggcatcaattaacacctgggctttgcctatatgaagacaactgtgaatacttgtgctggctctcatgagcgtggctgggaacgcctgaactggctctgatgaggacggctacaataccttggctgggccctgtgagcatagatgtgaacacttgagcaggccctgatgaggaccactgtgaacatctaggctggccctgattaggaaaggtggaaacacctgggctgggcccagtgaggatgactgtgaacatttaggctgtacccaatgaggatagctgtgaagaactggcctgggtcccatgaggacaggtaagaatgcctgggcttggccctgtgaggacagctttgaacacctgagacagcccagatgatgatggcagtgaacaccttggctggtcccagtgagtgttgctataatagcttggctatacccgattagcgtaagtgggaacatataggctggacccaatgaggatggctatgaacaacttagctaggcccaatgaggatggctgtcaactcctcagctggctctgatgaggaccactgtgaacatttgggcaggcccagatgaaaatagctatgaacacctacgctagtcctgatgaagacagctaggaacacctgggtgaggcccagtgaggacagatatgaaacctgggcttgctctcatgaggatggctgtgagcacctggtctggccactattaaacagtctctgaacacctaagctgggcccagtaaggacagctattaacatctgtgctgcccaatgatgacagccgtgaacactaagccagataaggatggctatgaacatttggggtggcatcaaggtagatggctgtgacccgccaggctggccctgataaggatggctctaattccttggctggcccaaatgagcatagatgtgaacacctgggctggtcccaatgaagacaactgtgaatacctaggataggcccgataaaaacagctgggaacacctgggatggccttcattaggatgtctccaacacctggactgggcccaataggatggctctgaacacctggacttgccctgatgggaacctctgtaaccacagtgctgggcccaatgaggacagctattaacatctggtctgaaaactagtgaagagtgctctgaacacttaggctggacctgatgaggatggctgtgaacacctgacctgacctcaatgagggcagccatgtaaaactcggactggcctagtgagtacggctgtgaatgcctgggctgatcctgatgaggacgacagtgaacatgtaggctaagccccatgaatacagctctgaaaacctggacattgctcctatgaaaatgattgtgaactcccgggcaggcctcagtgccctgtggacctgactctggggagaccaaagtagccctctgagacctgcaccctgccccagagagtccccgcatcctcacctctgtgccttcccagtgacccccgcacctctgcctgtgttgcagattcctctaacatgaaagagtcatgatgtggggatgtcaccctggcccagaaaggatacaaatcatgatgctctggaagattttatttagcaatgtcttgtatatagctgatgttatatttgttgttcttttatttgttgtttttatagtggctttatttgttacgtcattatatttgtcttgctatattatttgttgtcttctatatttgtttaaagttacatattaagtaatagttatccccttctaattgcttatagaatattttcctgtgaaatgaaacccatgataggaaatctccctcagcagagctaggactcactgaattagaaagcagtccctccagtgactgccactctctctcttatgtcttcctaatttcatcttaattggccgaagtaccagcaaatacaccctcactcattgtctttacatcagtgtccttcgagagattgttgtctgaaatctgttccttcctctggaagggatcctgggaacaaccttccccacggtctccacagtgacttagctgtcagggcctttcctgccccatggtcagcacagctggtgtgagcttcctggctcactggcgctttccctgagtgtcttcagaatttttctccatttttttccagcatagagtatttcttgctgagaggtggatgagagtctaattttcacttctttgtgtattactcactcttctagtctagatgctttaaaaatgcgttttgtcttcaagttcaggagtttactcaaatatcatttgctgttagccatttcacatcaatcctcagtattcttttgaagaaacacttacaaaacattgtttttattttcagaaaaaattggaatgatcgttgttcatatttccttgtgtctttgctttgattgttctcgttcaggcaccttaatcatgcatccatttggctactctccctaaacatttataacctcttgctcattttcttttgaaatattctcctcactttaaccttctgtttcttagaaggcagaagctgtcattgtgttgtctctagtttacattttatagctgaagagtgtttccaattatttttcttagtctttttggagtttcatccatgcattgctctatttctttaattctgatgaatggtgtccttttgtgtttgatattattttcttaatgcctttgatctcattgttgaaaaggccacagtccagtgggtgagttacattgaggtgggaactttcacattttctagtggttttactctataagtattcattttgtctattacatgtctttgtatgagaattggcatcaatatatttctgttgctgatttttatatggattttgtcttcatgaatttgtaatgagcattataattcagaaaccttttccaacctcatagagcttctctctctgaaatctctgtgcagtgctcacaactatgacaccggtttcctggaatttcctgcctctgtgcttctccccttctgtaacaggagcctcctccctggtttcctccactgcactccaatcctctctttggaacctgcaactgaatattgctcctaaatgggaagactgtcttgcaaggggacaactgccacaatattgccaaaatgtaagctgattcactttaagtgcatattcactttccagatcattttgttcttttctgttatatatctgaaaaccggtttcttctctgacttattttatttatttttatttgtcagtattttattcttatgattatcaatttttacttttttgtgtatttaagattttttgtattttgatgtttatatttgagtgattttagacttaattttcacatgattttagatgtatctcttttcaaagtgatttgttgtttgctgtggggatttatctttaggtattgggtggttgttatttattttgaatccagtagattcccagacatgcagggtcatgtctaactgggccacaaactctttctgcctcttgacattttcaggcatagacaacaggctcttcacagtgcactgtggatgtcacaaaatccccataaattgtccttaaattattgcccatgttttattaaaaagtattatttaggaagtaacctctgaaaagaaagaactcttttaattttctttactaatatttaaaaatttagtccacatataaaagcatgtctgtcatattatgccccaaatcctcttattgagcaattggaaaacatattcctaagctgaggcttacagtcattgctcgttatctgcaggggttggtttcaggacccccacagattccagcatctgacaatgctcaagtccctggtataaagtggcacagcatctgcatataagccatgcccgtgctcctgtgcacttgaaatcatctcagatctctcctcaaccccataggcaggaactgctatgcaaatagttgttatcctctctgccagcccctacctccacctaccttgtcttatgcctctcttccatgtgacttttcctgagctgcattttttaatatgaaataaacctgtacatatgagtagagtgcttttctgagttgtctgattcattctggtgaacctgagggaggtgttgtgggaactcctgaattggtagtctgccaggaagaagcctcggcagctaggccaccccattggttgctggcatctaagtgaggacagtgctgtgggaccgagcacataatcataggcctgctggccatttgtatgtcattttttgagaaatgtctcttcaggtcatttgaccatttttaaagagattattttgttttgctgttgactcgagttccttatatagtctggatattaatttctcattcgatggatagtttgcaaatattttctcccattctataggtcatctcgtcactcccttgattctttgctgtgcagaagtttgttagcttgttttggtcctatttatgtatttttgctcttctcacctatggttttttttaaaaatctcagcccagaccaatgtctagaggaatttctcaatgttttcttttagtagtgttatattttcaggttttccattaaagtctctaatccatctggatttgcattttgcatataataagagataggggcccagttttttctctacctttgaatgttcagttttccccttatttattgaagagactcttctttctttaatgtatgttcctggtgcaggtaggaacggagtgctagtaggagctgggtgcatggctcgagtaggagcaggagcagagtgctggtaggagctgggtgcacagcacaggtaggagttgggcacgggtaggagtggggtgctggtagaaggtgggtgcacggcatgggtatgtacggagtgctagtaggagccggatgcatggcatgggtagcagcggagtgtcaccgcatgcctccctggaggacctgtcgggactgtggccccaatggcagcctggccctgcctcaatggcctgggctctgaactgcaggatctcacaggtggaagaaaccttggagacccgcagcccccagggccatggtggctcccaacaggggagggccacccaaagccccctcccatggtgcccttgccaaggagtccctggatgggcctgtttagactcctttgatgatggggcccccatgaccccaggacagccctgaccatctcttactcactgttgaccttccttcagaccaggagatgcacaatatttgccaataggaatctcccatcttcccttaattcaactgtttcactgacatcccacaagcaccaccccccatcaggtgcccttaacctgtgtcctcgaccccattgaccttcagaaggcctcacccatccagtggctccatggcagaacaggtctcccagagcccaggccatggagcagagcctcccgtggcaccaacagtggcagcagtacctgtgcatgctcccatgtcctgagcatggactctggacagagcaaggtcaggctgcaaggctgtctttagtcagggcctgaccctaggacagtgtggaaacactggaatggtttcagaaagggatggacagcattggatttgaggtccttaaaagtgactttgggtactgtgtcgagagtggatggactggcaggagtgagaggctcagggcaagtgaggaggcagctgaagaactcaagaggcagtcaaagggggactcgagggtgggaggaacaggcacatctgttcacagctgtgcctcagaagccctgtgtttcacacacttgccgatttcagaaagggccatccatcattctcatgaagtgtctactcattctgaaagaactcatctagatcttgagtggctgcctgttctttccccttagagttacaattatcattttcatttacttccaactaataaatgcaagtggctgattctgatgagacctgtttcatttcctgcttgaaagtctagagcaagaatacttagctcagagactgaaagtctagagcaagaatacttagctcagagactgatctggatgaggctggggaaggagaccaccagagcttaaacgaagccactaaaagcagtaagagaaacaactgtgaagcctgtgagaaaagcagggtgtgtttctgataaggaaaggtattaagtgtgaaggaaatgtttttattaaagaaaaagtactttgtccttaactaaaatgattcgttactccagaatgaaaaaaaaaaaagagtagggcaaaatataaatggacatagaaagttgtagaaggtttgtggaaggcaaatgcatatgtggtgaagccagtaagattagatacatttatttataaaattcattaaatgtggccaatagtgtaccgatgcaaaactagaatttctatttctgtctgttaaaacaatggtttcttagattgttggtcggctttttaaaaagattgtaaaaagtttttctttaccttttaaattatttgcccaggaaacaaagattttgtatctaatcatcataatttcttgggcttaatgttaacctttatcaggtccttgcttatgtaagagaattagtgctccttacttttaaaagtgcctctcaaaagcagatcctagatgaaactttcttctccaatggtcttgagatttcccagagggatttagaaaaacctgagagaatttgttctttcatctcatgaggagatatgttcaaaataatgtggtttatttgataagttcagttgcctggaaagatgatgtcaaataagaaacaaaaaccttcccttggttttatttgcatgggtagaaagtattaacataaatatttcagaaattgtatgaaattcctagaaatgtgtcagtgtctctactgctcataatgtgtccgggtatgttatcagtcataattccagctgttacttttaaatgttgcatgccatggaaatcacctaaatcccttgtgaattgcattatttttataatgaggtctcaataggcctttaatatggtcattttaagtcttgtcattcacagattttgttattctcttattcttctttaaaatattttcagttaccagccaaagtggctcctcttcaaaaaaaaaaaaaaaagtgatggtctgagacccataggggcttcgagtaaacgtttccgatgacatttacttacataattttgagatcataccacttgactgagttaagatttgcagaatgaatggaggagctgacggatgcataaaactgctaattcaagatcaagcagaacagaatttaatcacataggactgaatgaactgataaagaatgataatggattttgtttgaaacattaccggctcacccaggcgcagtggctcacgcctgtaatcccagcactttgggaggcgaggcaggccagtcatgaggtcaggagttcgagaccagcctgaccaacatggtgaaaccccgtctctactaaaaatacaaaaattattcaggtgtggtggcgtgcacctgtaatcccaaccactccagagactgaggcaggagaattgcttgaacccaggaggcggaggttgcagtgaactgagatcgtgccattgcactccagcctgggcaacggagcgagacaccatctcaaaacaaacaaacaaaaaactcataaaaaaagaaacattgctgactctttaatgtagtattttctgggtgtatggaactcctttctcttttctgttcagctgtctacaactcatagactaaattttgtgaacagaaataaacattttatcttctccctgcctgattccttcagaatttagaaactcttaagggcaataaaattatttgcataagttcaaaaagaatctgttctctttgcaacaggacacaattagaaatattggttatattaccaaggccttgactggaatgtcatatttgggaataatgcataaaatcagacatgaccagacaattttaaggaaataagataaactttatggagccaatgcctacaaagacttcttgaggaaaccagcctggcacctggcttatagggtttccaggcatacaggtgactaaggaaaaaccacttcacggcatccccaggaaacaggataatttggggacccggaaaaagaagaattcattcacatctatcggtattggaggtgatggcttagcttatcttcctaggcttgggtttctaggctcaagagtcttttaaaggctaattggagattctgtattacaagttacagaaaagcttgtctatgtggtcatctcttcttgctgcagtcatataaataatcagttcaaatctaataagattacttatgttgtaaacaagaataaatttactttggttattttttatcaattaactgggaggcaatgactatagaaacttcacatttccatggagactttccaaactaatgtttgcaacttttctccttccctcctgacttggcttatctgagaactagaactgcccttttccccaagccctgcaacctgaaactgcatgacctgatataagtttcaagaaaatcacacaacaactcaagtgtggacaaccttcatgcctgctgctgtgtaggccactcagaaagctccccagcacactgcacagtatctccaaagatactcaagctgcaaatggaaagaaccattggatgaccttgcttttcctcactccagcatgtaaaggtgtttcaagcccagcatttacaaatctgggctaactgccctctggactctgaagtagtagttactctcattttcctttttactcatagagattttcatcattaaatgcctaaatgcttgtatcatccagcaaatatccccctccaaatgagaaataatcttgtattgttcaaaggaaagaacaatgtctctttgttctttgaataagggggccaagggtaacaaagactatctcgttgaccaagctagagtcagcctcctctaagtcctctttttgactaggccacagctttgagctctgctcttggcccatttagtccagttttagaaagaaccctgctgaatccatttagcaaacatcctccactcttggtatctgatcactgtccatatctgaccaaatgccaaattgctgaccctcaacatgttgtcatcatggcctgccttcagcaagaatcctggtgagttttagccttgatgtgttctcttaggaatttaccatccactgatcccagctctgcttcttggctataaatctccacttgtcctcactgtattcagggttgagcttgatctctctcccctactgcaaaaccacattgcagttgtctcttctggagtaggcttccttgtcatctttaagtgtatgagtttttttcttaaaaaaaaacaatagttagggaggacaggtagcattaggagatatacctaatgctaaatgacgagttaatgggtgcaacacaccagcatggcacatgtatacatatgtaactaacctgcacattgtgcacatgtaccctaaaacttgaagtataataataataaaaaaaggttataaaaacaaaataaaatttgcatttagtgtacacagtctgattgccctgaaaactgtctttcctagtttgttctccaaccaacatgtgcaatgtgcctgggaccatgccctcttatcaagggaaaggcaggagagagctggcatgagggccattcaggatatgaaagtggctgggtgtggtgactcacgcctgtaatcccagcactttgggaggccgaggctggtagatcatgaggtcaggagttcaagaccagcctggccaagatggtgaaacctggtctctacaaaaaatacaaaaaaaaaattagtcttgcgtggtggcgggcatcccagctactcgggaggctgaggcagagaattgcttgaacccgggaggtggatgttacagtgagctgagatggcaccactgcactctagcctgggccacagagcaagactccgtctcaaaaaaaaaaaaaagaaagaaagaaagaaagaaagtgatgtgagaacaagatgttcctgatgtggacatcatgaacgactccagactggagtatcaaggctgacaaggctggaaagattcccttgctgagttttgcaagatatgcacagtaaccatatactaattttgagttgcaaaattgaagaattgtttatatatgtcctcatcttacaagaacacctgaagtagctcagttgtaagagatttagattgcaaatcaaaaggtacttggatggggcccaggttccagtaggatgatcaccttttttatatccaggtctcatttcagtcataagaagtattcacagcagagcttcccctgcaggatgctcaagtatatttgctgtggcaactgagggaaccaagcctcagtcatgttccccagagcttgcccatggcatttacatttgcaaaaagtaaatctcttgatttccttttggtttcagtagtgtgatttccttttcaaaaataatagcaagtgatactagtttacatataaatagaaactgtaaagttcctttgtttttactatttatcaatatatttaataattatatatatttatatagcctgaaataatgcaaacaactttaaagaattgacacatttgtttatattttacaggtaaaaagattaaaattttggcttatttgcctgaagtcacactgctagttaaatgacagagctaaaaaatgttaaataagttgctaaatgaatgtaattaatttggtttgtttgtttcctaaaatattgatttaaatgtctttatttaaattttaaaatgatagcatttgaaagagtataaataaaattcttaagccgcaatagtaaaggaatttagttacaatgcatgaagttagaagcaatagctttggatttgtaaatgtattcttgaagggtgtcataaagaaatattttattcctatttttcctttgttttgttggagtagttttcccccatctttaatgaggtataattgctttaccagttcgaataggtttttatagccattgtggagtctttagatttttctatgtatatgatcatgtcaactgcaaatagggagagtttttcttcttccttttagatttagatacatgctatttctttttcttctcttattgctctggatagaagttccaatactatcctgaatagaatcaatgagagtggatatccttgccttgtatgggattttagaggaaaggccttcagctttacaccattgattatgttagctgtgagtttatcacctacggcctttgttgtgtgggggatatgttcctcctatacctattttattgagagttttttttaatcaataatagaagttgaactttgtcaaatggtttttctccatctgttgagatgatcacatgtactttttccttgtttgtgtattcaccacattaattgattcacatcagctgaactactcccatatcccagagatatatttcactttgtcatgctgtatgatccttgtaatgtgcttttgaattcagtctggtcatgtctcattgaggatatgtgcatctatgttcatcagggatactggcttgtggctttattttcttgctctttttctggctttggtatcagtgtgatgccagctgcatcaaatgcatttggaagtgtcccctctacttacatgtgctggaagcatttgataaggattgttattattcttctttgaatgtttggtagaatccactcacgaagccacctggttctgggcttttcttttttgggaggtttttgtttgtttttttaaaatattattcatttttccatctttattgaggtatcattaacaaataaaaatgtatatgtttacagtatacaaagttatattttgatactcatattcatcatgaaatgatttcccccaatcaaactgagtaacatgttcttcacctcacatacttatcattctttttgggatatggtaaaaacgtttatgatttactctctcagcaaattttacacattcaatacagtaatattaactagtcaccatgctgcacctttgatctccagaacctattcatcttgcataactgaaacttggaacccttttaccaatatctccctattttcctcacctctcagtcctcggaaaccatcattctactcttggtttctgtaagttcaacttctttagattccacatatcctgcgattatgcagaatttatcttctgtgtctggcttgttttgtttagcatgccctccaggttcattcatgttgtggcaaatgatagagctttcttctttttaagcctgagtaatatcctattgagtatatacagtgcattttctttatctattcatccattgatggatggacacttagtgagggtggcatgtggataggaggcgttctgcatttctccagttagatctcagtctttattgagcctgtgtctctgaacttcacatgggtttctcaggcttctcccacgaggtcgcaaaggatagctaaggtggactggagctggacatttccctcccccaacacagagggctggagctagctgagatccagtctcactttccctacctaggtcagtgaggttctgataaaatcttagaaaacttaggttctggttaagtagttttgcctgaggacagactttgttaagcacagagcattctggtagcatgagtatttccccccagtatttactgtgagaacctggttgagctactggaggtcaaaaccacaaaacgatctcgcttccccatgactgagtgcccctggtgtttttagttctcaggccagtccacagccagcctctagcagcttcattgcagctgaagctctcctgccctagcctggctcccacagagctttctgcacttgtgtgtcttgactccctgcattcattttcctgtctctgtaattttgaaagcagcagttgccccatgaatttaattattttgtgaatctatgatgaatagttgattgttcagctttgttctttttgttaacatggtgtatcagtccattttcatactgctatgaataaatagtagtgtgggtaatttatgggtaatttattactgggtaatttatgaagaaaaagaggtttaatggactcacagttcatatgactggggaggcctcccagtcacagtggaaagccaaggaggagcaaagtcatgtcttaggtggtggcaggcaagagcctgtgcaggggaactctccctatttgccgatgacatgatcatataggtagaaaagtgatagtgagacttattcactatcacaagaacagcacaggaaaaacttgcccccatgattcaattacctcccaccaggtccctcccaagacatgtgagggttatgggagctacaattcaagatgatatttgggtggggacacagacaaaccagatcacatggaatggtgacttccaaactccttataggcagaaccccagactgcaggggtgatggcaggaggcagtgcatggttaggaagctgcacagtcatcctgttcagaggagatcaggctctggccaggtagaataggtggagggacagaagcagtcaggtgtggacatgctgtgaagctacagagaggggctctgccgatggagtggagatgaggtagagagaagacagaagtcaagaaaaacaaaacagtgggaacctgaacacctgtggggatggagctgctctcatggaagaggaggatgagggaggttgggctcaggggaggggtctagagcttgggcttggtgtgttagatgtcaacatagagatgttgtggcagtggctgtgtagctatgaatctagactaaatgaaagagtgtggaatggataaatacagaggtcatatcagtatgggtggcatgtaaagccaaggggctaggtgagaccagcaaggggatgagtttctgaagaacaaaagtgacgcaagaactcattcatgagtcaaagctaatggtaacaggtttgagagaaaaatagaatccaacaacagagaaacagaaaggatggccagtgagattggaaagaaaatagcccactgaactggaagctaagtagtggaggcatttcagggagagagggatggactgtgtcaaatgcggccagtagagaaaagtcagagggacctatttgggtgatgggagtgttctaaaatggaattgtggtgcttgtttaattctgcagattttgttttaaattaattgagttgggtgaattttaggacatgcaaataatagctcaataaagttgtttcataaaatattagcatatatcaacccagatgttctactcccagagaaaataaaagctcatattgatcaaaaggacatatgcatatatctataatatattcataataccccacatttgaaaataaacaaaatgtccatgaaatattttgtgtaatatttgtctcagtaatataaaatgtcatattaccgaaacaaacagagtgaactgcttatctacacaagaacagataagtttcaaaaacactttgagcaaagcaggcagagatcagaaagcacattgtaattgattccatgaccttgatgctgaggctcaactgggatgtgttcagagcaaccttctccaaggctgcgtgagtcagggcgagtggacactgattggaaaggaactgggggggatttctgtgttgatacacaggactcataccttgatagggttgcaggacgcagtgggggtataacattttaaaggcttattcaagctatacacttaagattggcacctttcactatattttaattgtctgttgatacacatacaataagaaacaggtaaagaagactgattactagacagtaaggagacaagcatgtttatttactaatcctccttgatggtgaccatgaaactgactagtataggctgcctgttcctggttgattccaggtggaatgctgaggtgttccccagggtttgttgtggtgcagaatccatggttgcagggatggaggggccgggatcttctgtgaaacttcgtttggggctgatatttacgaaatgtgtgaggtgatatataagatgctgcccaatggcttcagtccacaactcactttccaaagccatcaggggagacactggtctcatcagcttcttggtaggtcttttatttttgttcagacttgttgaatctgttagaagctgactttatgtaagacatgaaaagtgactcacaaaacacaggctgcagaatgtgagaaaaaaatcaattcatttagaagcttggtgttttgaaaaaggagtatgcagagatggaggcagcactagagaatgcctggctaaagaaggagtctttaaatattcccagccttgcagatgcttacaaaaaggtgaagagtgccaacttggtatcgatgaaggaattaacttctttggttcgagaagtgaaaaagaaaagttccaaatgctctaaccaacgaaggcaatggaggagctacctaaaatgctggaatccctagacaaggtcgtgggaatcagcccacagcaaggagctcttccaaggtggccaagagtgtggccctgctgctcccttccctgggagtgggcctgggtcttaagggagcgctgttccctcctctctactcaggcctcccaagcctccaggctgccttccccacctcgagtccatctggggcgggtggatccaggagcccctcctgggctggagttcctccaccttcacatgctgacatcacagccagctccttcatgttcaactcctccacatccaaggaacacggggcttcctggcgtgcaccaagaatgtgagactttcttagtcttcacagaaagtttagattctctctcaccagcagtgaaaaaatactgtatttaagatactatcttttactcagattgaaactttgtcaaactacatttttcaagacaatgttttgttaatattatttatattaatcttataagtgaataatttatattttatgatataaatattttattaaaattttaaaacagatggaatttaacaacaaagactgttagtagtcaatagtgtaaaaggaaaataaaatgttgggaccccaaactcgctatgccaaaagggaaagttaaacttggaaactgagtcacacccagaaaccatctttccttttgttcctaaacatatctttccaggttacctccctcaccctgaccatgtaaattagcaacttatcttcagggatacaggacaaaaggaaactagaaatattcctaccaccaccccaagacaaatgcatgttgatgcttcctctactctatgtttgctttatctcatgtgaggtgcagccttaccagtgccaggcgagcacataatcagctgttcctctaccccctccttttcatgggcaacctgtggcttcagtgagaactaatgaaagcctcaagacaatgagaccacttgtctcattttttctactctcccctttttgtcttctttcctttccctttggcctgctttttcccctataaatattgaaaccctcaaaactctttggaaaaagtgcaggccacagattccactgtggcttgtgtctctttttcccgggtgcatcctcaaccttggtgaaaaaaacctctaaatagattgacacctgtcccagacactctttttggtttccaatagcagtattttttccctagagttgtattcctaatgcccttaaatcatgagtaacagcaacagttttgcctaggtatgaatagtattcattgaacaaaagagaagataatagatctattttgggatggagttaaatggtacactgcaagataaatccatattatttattttttatatactcatctaataatggcaaaatatttatttaaaaaaaacaaaattgataaatgatctggagattgtattatttccctgccagaaaactgcagcgagagtttcctcactaggaagcaatgccccttgggcaatgtggggagatgtccacatcgctgccttgtccctttctcactcacctatgaaccctcctcaggggacagatgaggggagtctcagtctctcccacataataaacctgggatccccacaattagtatctgtagttacaaatgatgcccccactttagacaatgagcatgaagtgggtgttgttttagtggaagaagagcagcaagtgatcctttgattaactggtgtagtcacataagataaatgacaaagcatccaaagaaagctaatggcttcctctcaagaatgagtaaaacaaacaaacaaacaaacaaaaactatgcttgagttggagacaaagcaatgaagactagaaagccagagcatcatggggccaaaaccatggcgaggttgtgcagaggcatcttgtcaccatctccttttctgccgcccttctcaggcggtccagagggaagaggaaggtcaccaggttggcctccaggagaaacagcggcaggttgagtatgcagctgtcctttgcaaggtggtctgtctgaaagagcaatgccctcggttaaggtgaggtagaacttgtcagtgaagaggggcttgggctgctcacggaagtatctatattagacaaatctaaagagacataaagttagagattattacaggctgagaaaaggagggaatacaaagttattgatttatgggtacagagtttcttgttaggatgatgaaaatgtttgcaaatggtggtgatggttgtacaacactgtaaacataattaatggctaatgttatgtataaatttgaaatacacattggcaattttaggaagctatacaaagagatactctcaatgacactgtggataaatcaaggttttattataaaaagtgctgaagtaacaaacaggaaggcaggaaaaataaaaagagaaataaacaacaacaacaacaaagaatagagagcaatcacaaagcaaaaagtaaaatgccagacttaagccctgacaaattaagaaagaaatgggcagagttgattttaaaaaccttaacccgagtagcctcactaagtgaaactcacttcaaatataataatataggtagcttgaaaggtaaaggatacaaaaaagtatatcatgcaaatattaatcaaaagaatacaagagtggctatattaatatcagatcatgtagacatcagatcaataaaaatcattatagacagagagaaactatatataatattgtttacataacaatactatgtatatgtatgtacatatatacatatgtattatatatacatggaacacctcatctaacaacagcaaactactcattattttcaagtgcccacagaacatataccaagatatatcatatatggatcataaaacaaacttttcaaaagtttaaaagagttgaaattatactgagagtatcctccaaccacaatggaattcaacaagaagataacataaaggtaagaggaaaatctgcaaacactcagtgtggctgtttcctcatgtgaaaatgtaacatacaaatgtgactagcttaaagactttggaatgagaatattattctggcttatccagatgggccataactataatcacaggtgttcttataagatggaaagagagagaattttaaccacagaaatggagaaagccacatgatgataggcacagagactggaagggtgcagccacaagccaaggaatgtgagccatcacctgaagctggcagaaacaaggaacgtattctctctggagctgacagaaggaagcagccctgatgataccttgattttagccacataacactcagcttaaattcctggcctccagaactgagaaaaaataaatttctgttgttataagcagttaaatttgtgacaatttgttacagcagcaaaataaagctattatactgtgaatctaaacacattctaaataatccctgggtcaaagagaaagtctcaaaggaaatttgatattatattgaactgaataaaaatataatatgtcaaaaattgtgggacagagctaaagaagtgccaaagggaaaatttacagcataaaatgtacgtattagaaattctcaattcaattatctaagctcctacctcaagagtctagaaaaagaaacttaaaataaacccaattcaactaaaagaaaggaaataataatcccagcactttgggaggctgaggccggttgatcacgagctcaggagatcaagaccatcctggccaacatggtgaaaccctgtctctactaaaaatacaaaaattagccgtgcatggtggcgtgtgcctatagtcccagctactcaggaggctgaggcaggagaatcgtttgaacctgggaggcagacgttgcagtaagccgagatcgtgccactgcactccagcctaggagacagagtgagactctgtgaaaaaaaagtgaaagaagaaagaaagaaagaaggaaggaaggaaggaaaaggaaggaaggaaggaaggagggaagaaaagaaagaagaaagaaagaaagaaagaaagaaagaaagaaagaaagaaagaaagaaagaaagaaagaaagaaagacacagaaagaaggaaggaaggaaaggaaggaaggaaggaaaggaaggaagggagagagagaaagaaaggaaggaaggaagggagagagagaaagaaggaaggagagaaagaacgaaagaaagaaagaaagaaagaaagaaagaaagaaagaaagaaagaaaagcagtgagattgaaaacaaaaataatacagaaaattaatataaccaaaaactggttctttgaaaagatgaataaaatggacacatcttagcaagtctgctaatgagaaaaaagagaaaatacatcaattttcattatcaggaataaaatgggatatcactataaaccatgcagagatcaaaaggataataaataaatactgcaatcaactctgcacatacaaatttgacagcttaaatattcacaaataaaaattcacaaattcattgaaaaacataaactaacataactcaatgtaaaataaattgtttgaatatactcacaattattaagtaaattgaattcctatattaaaattatcaaaaaagcaatctccaggtccagattgtttcactgtagaatttggccaaacatttaaagaatagcaccaattctacacaatatctttcagaaaacagaagagaaggaaatactacaatttatttcatgaaaatatattaccctgatatcaaaaccagacaaagtacaaacaagaaaactacagacacataaatgtagaaacagaaacctttaagaaaatattagcaaatagtattcattgatgtataaaaacagttacacactatgaccaagtgaagtttatttcaggaatgcaaggctgcttctatgtttgaaaatcaatgtaatctacgacattaacaggctgaagaaaaaaatcaaacgattatatcagtcaattcaaaaaaatcgtttgacaaaattcagcacccattcatgaatttatgaagaaaactatctgaaaaataggaataggagaatttttaacttgataaaatcatctgtagaaaaaaaaagaaagctaaattacacctgagaatgaaaaactgaatgctttctgcaaaaattgggtgtatggcaaagatgcccacttttgtcactcttattccaatattgctagaaattctagccagtataggaaggcaaggaaaatactataaattagaaggaaagaaacagaccctagttgcagatgacatgatcgtgtgaaaattcctgaaactttcaaataataagcaaaaaaaacccctcctgaaataaatgagttcatgtgtgtgtgtgtaatgtgtgtgtgtaatgtgtgtgtgtgtgtgtgtaatacatatagttggcacttggtatctgtgggttccacatctgcagattcaatcaaccagagataataaatatttgaaataaaaactaataaaaagaacaataaaatataaaatattataaattaaaaacaatataacaactatttatataaaatttacattgtgttaagtattataaataatctagaaatgatttacagaatacaggagaatgtgtgtaggttatatgcaaatactatgccctttttagttttaatttttttaatttttaatttttatgggtacacagtaggtgtagatatttattagatacatgagatgttttgatatactcatgccatgtgaaataatcacatcatagagaatggggtatccagcccctcgaacatttatcctttgtgttacaatccaattacactcttttagttattttaaaatgtagaatcaagttatcattgactatactcaccctgttgtgctatcacatagcaggttttattcattctttctaagtattttttgtacccattaaccatacccactttcttcctgatccgccactacccttcccattctctggtaaccatccttctactttctatgtccacgagttcaattgttttaatttttagatcccacaaataagttagaacattcaaagtctgtctttctgtacctggctgatttcacttaacgtaatgatctccatttccatccatgttgttgcaaatgactggatctcattcttttttatggctgagtatactccattgtatataagtaccatattttctttatccattcatctcttggtggacacttaggttgcttccaaatcttggctattgtgaacagtgctgcaacatacatgggagtgcagacatctctttaatatactgatttcctttcttttgggtatatatctagcagtaggattgctgaatcatgtgatagttcaatttttagttttgtgagggacttccaaactgttctcatagtggttgtactgatttagatccccttcaacagtgtaagagggttcccttttttccacattctcaccagcatttactattgcttatcttttgaatataagccattttaactgggtgagacaatatctaataccatgaccttttatataaaggacttaagcatctgcagaatgtggtatttgtgggggtcctggaaccaatctcttgtggaaactgagggatgactgtattggaaataacatgcaagcattaaaaaatttttaaaagtacaatcacttagaaaataatacaatagagtaaatctaacaaaacatgtacaggacttaaatgttgaaaaccacataacactgataaaataattcaaagttctaagtaaataaaaaaccatactatgtttatgtattggaagattcaatatagtaaagatgtcatttttccctaaattgattcataggttagaggtgattccttttaaatcccagcaaggttttttttttttgtagatataaataagattatcctaaatgtatacaaaaagacaaaggaactagaatacccaaaaccatcttgaaaaaaaatgagagaaatttgtctactctatttcaagacttacctagtcaaaaaggacaaggtagagagatagacctgtagatcaatggaccagacagagagctcggaaatagaatcacataaatattctcaactgatttttacaatggatgaagattgactttcaacaaatggtgctgctattcacaatagcaaagacttggaaccaagccaaaaatccaacaatgatagactggattaagaaaatgtggcacatataccccatggaatactatgcagccataaaaaatgatgagttcatgtcctttgtagggacatggatgaagctggaaaccatcattctcagcaaactattgcaaggacaaaaaaccaaacacagcatgttctcactcataggtgggaattgaacaatgagaacacagggacacaggaagggaaacatcacacactggggcctgttatggggttggggaagtggggaaggatagcattaggagatatacctaatgttaaatgacgagttaattggtgcaggacaccaacatggcacatgtacacatatgtaaccaacctgcacgttgtgcatgtgtaccctaaaacttaaagtatatattaaaaaaaccaaatggtgctgaaataattacacattcataggcgaaaatcctttagttttagtctcatactttatatatgaattaactccaaatggatcatgtatttaaatgtagaatacaaaactatagaaaaaaaaaccttcaagatctaggactaggcaaaatattcttttgatagataccaaaagcatgatttgcaaaaagacccatttataaactggacttcaccaaagcgaaaaccttttgctctgtgaaagatcctgttaagcagatagaaaaacaagttttaaactgagatcatgtattttcaaatttatgtatgacaaaagactggcatttaaactcaacaataaaaactcagtaacaaatcaaaccaccaaattagaatatgaccaaacgcatgaagaggcatttcaaccaaagaaggtatacagaaagtatagagcacatgaaaagatgtttgacattgttatccattaagaaacacaaattaaaaccacaatgtgccataattaaatgcctatcagaataaccaaatttaaaaatatcctaataaccctattgctggtgggaacgtagtatgataaagccaccccctgatgaacagtttgggagtttctgtaaaaatttgacacatgcaactaccatacaaaccagttactgcactcctcatcattcatcctacagaagaaatgacttctgttttcacacacataaatctatgctggagtgcttttagcagctttatttgtaatagccaaagccagaaaacaacccatatgtccttcaataggtgaaagggtaaacaaagtgtggtacatctatacaatgaatactactcaacaataaacatgggtcgggcacggtggcttatacctgcaatcccaacaccagaaggcagaggcaggaggatcacttgagcccatgagtctgggaccagcctaggcaacatggcaaaatcccatctctacccccaaaatactaagaaattagccacgtgtggtggggcacacctgtagtcccagctacttgagaggctgaggtgggaggatctattgagcctgggagtttctaccactgcattccagcatgggtgacagaggagaccctgtctcaaaataattaattaaaaaaatttataacttaggaaaacataatgaatgagttatttacacaccaataacccagaggaactgctggagaattatactggtaaaaaagctaaccatcaaaagctatatgctgtacaattccatatatgtaacattctttaaaaaaataacaaaatgaagaagcaattagtgatttccagaagttaatgaaggtgtggaggtgggagggaagtgtgtgtggctagaaagagcaacatgactgattgttgtgttgatttacgattctgcatcttgtaatatcaacgctaatatcctgggagtgctgtccttctatagtttcacaaggtgttaccattggcaaaaactgggtaaatggtacacagaatttctgtattatttcttgcacagtatgtacatctacaactatctcaaaaaatgttcaatttgtaaaaagtagctgcagaatgtacatgacatccctaggtgaaggtgacctatttataatagcattacatgtataaatccctaggaatggatttagtaagaatatgaaaaaagtatatagctttattactgaataaagggaattctgtcctcgttaggatactcagtagagtaaatataagaaaatttcctgaggtaaacctaaaaattccaccacaaacccagtcataatcataatatatttctttatgaaactctagacactcaatcttaggtttcttcaaaggaataaatgcccattagtagcctgaaatactctgaggaagaaatgagaagtgaaacatggctgatagtaaaatatagtgtaaatttacagtgatcaaagagaactacatcctagtaggaagagacaagtaaatcaacacaacaaagtagtctctagcaatgcacacagggagattttgttgactgtaaaggtgatcttacaggaaaaagaggaatgaacagactatttgacaacttactgtctaagtggaaagacaataaaaggataaatgtccatcttacataaagtgttctctaaattaaaaatataatacattggcataaaatacaacatactggtaaatgatacatacaaccagtttatagaaggaaagcaaatagccgataaacataaaaagatacccaacctcaccaataattaaggaaatataactcaaaacaacattcacttgtcagattgacaaatgcttaaaatatgtaaatacttaactatccaaaatattaatatccagggttggaatagaaatgattgaaatggagggggcgtggagccaagatggcagaataggaacagctccagtctacagctcccagcgtgagcaacgcagaagatgggtgatttctgcatttccaactgaggtacccggttcatctcactggggagtgccagacagtgggtgcaggacagtgggtgcagtgcaccgtgcatgagccgaagcagggcaaggcatcacgtcacccgggaagtgcaaggggtcagggaattccctttcctagtcaaagaaaggggtgacagacggcacctggaaaatcgggtcactcccaccctaatactgtgcttttccaatgggcttatcaaacggcacgtcaggagattatatcctgcacctggctccgagggtcctacgtccatggagcctcgctcattgctagcacagcaccctgagatcaaactgcaaggcagcagcgaggctgggggagggccccccgccattgctcaggcttgagtaggtaaacaaagctgctgggaagctcgaactgggtggagcccatcacagctcaaggaggcctgtctgcttctgtggctccacctctgggggcagggcacagtcaaacaaaagacaacaataacctctgcagacttaaatgtccctgtctgacagctttgaagaaaatagtggttctcccagcatgcagctggagatctgagaacaggcagactgcctcctcaagtgggtccctgacccccgagtagcctaactgggaggcactccccagtaggggtggactgacacctcacacggccgggtactcctatgagacaaaacttccagaggaacgatcaggcagcagcatttgcagttcaccaatatctgctgttctgcagcctccaactgctgatacccaggcaaacagggtctggaggggacctccagtaaactccaacagacctgcagctgagggtcctgactgttagaaggaaaactaacaaacacaaaggacatccacaccaaaaaccatctgtacgtcaccatcatcaaagaccaaaggtagataaaaccacaaagatggggaaaaaacagagcagaaaaactggaaactctaaaaatcagagtgcctctcctcctccaaaggaacacagctcctcaccagcaatgcaacaaagctggacggagaatgactttgacgagttgagagaggaaggcttcagaagatcaaactattccgagctaaaggaggaagttcgaaccaatcgcaaagaagttaaaaattttcaaaaaattagatgaatggctaaatagaataaccaatgcagagaagtccttaaagaacctgatggagctgaaaaccatggcacgagaactgtgtgacgaatgcacaagcctcagtaaccaatgcgattgactggaagaaagggtataagggatggaagacaaaatgaatgaaatgaagcatgaagagaagtttagacaaaaaagaataaaaagaaatgaacaaatcctccgagaaatatgggactatgtgaaaagaccacatctacatctaattggtgtacctgaaaatgacggggagaatggaaccaagttggaaaacactctgcaggatattatccaggagaacttccccaatctagcaaggcaggccaacattcaaattcaggaaatacagagaacaccacaaagatactcctggagaagagcaactccaagacacatatttgtcagatttaccaaagttgaaatgaaggaaaaaatgttaagggcagccagagagaaaagtcgggttacccacaaagggaagcccatcagactaacagctgatctctcggcagaaactctacaagccagaagagagtgggggccaatattcaacattcttaaagaaaagaattttcaacccagaatttcatatccagccaaactaagcttcataagtgaaggagaaataaaatactttacagacaagcaaatgcagagagattttgtcaccaccaggcctgccctaaaagagctcttgaaggaagcactaaacatggaaaggaaaaaccggtaccagccactgcaaaaacatgccaaattgtaaagaccatcaaggctaggaagaaactgcatcaactaatgagcaaaatatccaactaacattataatgacaggatcaaattcatacataacaatactaaccttaaatgtaaatgggctaaatgctccaattaaaagacacagactggcaaattggataaagagtcaagaaccctcagtgtgctgtattcaggaaaaccatctcacctgcagagacacagataggctcaaaataaagggatggaggaagttctaccaaggaaatggaaaacaaaaaaaggaaggggttgcaatcctagtctcggataaaacagactttaaaccaacaaagatcaaaagagacaaagaaggccattacataatggtaaagggatcaattcaacaagaagaactaactatcctaaatatatatgcacccaatacaggagcacccagattcataaagcaagtccttagtgacctacaaagagacttagactcccacacaataataatgggagactttaacaccccactgtcaacattagacagatcaacgagacagaaagttaacaaggatacccaggaattgaactcagctctgcaccaagcagacctaatagacatctacagaactctccaccccaaatcaacaaaatatacattcttttcagcaccacacctattccaaattgaacacatagttggaagtaaagcactcctcagcaaatgtaaaagaacagaaattataacaaattgtctctcagaccacagtgcaatcaaactagaactcaggattaagaaacttactcaaaaccactcaaccgcatggaaactgaacaacctgctcctgaatgactactgggtacataacaaaatgaaggcagaaataaagatgttctttgaaaccaatgagaacaaagacacaacataccagaatctctgggacacattcaaagcagaatgtagagggaaatttatagcactaaatgcccacaagagaaagcaggaaagatctaaaattgacaccctgacatcacaattaaaagaactagagaagcaagagcaaacacattcaaaagctaccagaaggcaagaaataactaaaatcagagcagaactgaaggaaatagagacacaaaaaacccttcaaaaaatcaatgaatccacatgctggttttttgaaaagatcaacaaaattgatagactgctagagagattaataaagaaaaaaagagagaagaatcaaatagatgcaataaaaaatgacaaaggggatatcaccaccgatcccacagaaatacaaactaccatcagagaatactataaacacctctacgcaaataaactagaaaatgtagaagaaattgataaattcctcgacacatacactctcccaagactaaaccaggaagaagtagaatctctgaatagaccaataacaggctctgaaattgaggcaataatagctttccaaccaaaaaaagtgcaggaccagatggattcacagccaaattctaccaggggtacaaggaggagctggtgccattgcttctgaaactattccaatcaatagaaagagggaatcctccctaactcattttatgatgccagcatcatcctgataccaaagcctggcagagacacaaccaaaaaagagaattttagaccaatatccttgatgaacattaatgcaaatatcctcaataaaatactggcaaaccgaatccagcagcacatcaaaaagcatatccaccatgatcaagtgggcttcatccctgggatgcaaggctggttcaacatgtgcaaatcaataaacataatccagcatataaacagaaccaaagacaaaaaccacatgattatctctatagatgcagaaaagggctttgacaaaattcaacaactcttcatgctaaaaactctcaataaattaggtattgatgggacatatctcaaaataataagagctatctatgacaaacccacagccaatatcatactgaatggacaaaaactggaagcattccctttgaaaactggcacaagacagggatgccctctctcaccactcttattcaccatagtgttggaagttctggccagggcaatcaggcagtagaaggaaataaacggcattcaattaggaaacgaggaagtcaaattgtccctgtttgcagatgacatgattgtatatctagaaaactccatcgtctcagcccaaaatctccttaagctgataagcaacttcagcaaagtctcaggatacaaaatcaatgtgcaaaaatcacgggcattcttacacaccaataatagacaaacagagagccaaatcatgagtgaactcccattcacaattgctttaaagagaataaaatacctaggaatccaacttacaagggacgtgaaggacttcttcaaggagaactacaaaccactgctcaatgaaataaaagaggatacaaacaaatggaagaacattccacgctcatgggtaggaagaatcaatattgtgaaaatggccatactgcccaaggtaatttacagattcaataccaaacccatcaagctaccaatgactttcttcacagaattggaaaaaactactttaaagttcacatggaaccaaaaaaagagcccacattgccaagtcaatcttaagccaaaagaacaaagctggaggcatcacactacctgtcttcaaactatactaccaggctccagtaaccaaaacagcacggtactggtaccaaaacagagatatagaccaatggaacagaacagagccctcagaaataatgccgcttatctacaactatctgatctttgacaaacctgatagaaacaaggaatggggaaaggattccctatttaataaatggtgctgggaaaactggctagccatatgtagaaagctgaaactggatcccttccttacaccttatacaaaaattaattcaagatggattaaagacttaaacgttagacctaaaactataaaaaccctagaagaaaacctaggcaataccattcaggacataggcatgggcaaggacttcatgtctaaaacaccaaaagcaatggcaacaaaaaccaaaattgacaaatggggtctaattaaactaaagagcttctgcacagcaaaagaaaccaccatcagagtgaacaggcaacctacacaatgggagaaaatttttgcaacctactcatctgacaaatggctaatatccagaatctacaatgagctcaaacaaatttacaagaaaaaaacaaacaaccccaccaacaaatggttgaaggatatgaacagacacttctcaaaagaagacatttatgcagctatacagacacatacacacgtatgtttattgcggcactattcacaatagcaaagacttggaacaaggccaaatgtccaacaatgatagactgggttaagaaaatgtggcacatgtacaccatggaatactatgcagccataaaaaataatgagttcatgtcctttgtagggacatggatgaagctggaaaccatcattctcagcaaactattgcaaggacaaaaaaccaaacacagcatgttctcacttataggtgggaattgaacaatgagaacacatggacacaggaaggggaacatcaaacaccggggactgttgtggggtgggggaggggggagggatagcattaggtgatatacgtaatgctaaatgacgagttaatgggtgcagcacaccaacatggcacatgtatacatatgtaacaaccctgcacattgtgcacatgtaccctaaaacttaaagtataataataataaaaaataaaaaaataaaaaataaataaataatcaaggcttttacagaaaaaaaaaagaaatgattgaaatgattattgccagaagcacttggtgggaatatgaatgggaactgcttttttttttttttttaggataatttagttgtgagataggaatagaactgggttgttgcaggaaaatggaaaaacccaaacaatagctgaaacaagaactaggcacaaaaacccacaggataacagaaaacccaaaataagggagagaaaatgtctaaagccccagtgagggtgacatgtccatgacccttccaggcaaacccaaataagggaaaataggggtcagtaactggggagtccatgaaacccctccttttccataatatttcatgattatttcactctcaaattaaagaaacaggcataagataggaatgctgggtgatcacaggagaagcaggaaaatatcaagaaacaattttacataatgtcaagaaaagagctgttaaaattagctataaggacaaagatgagcctggcctgataagatcctcacagataaaatggggccacactggctgaaacagtctaggtccaacatggcattggatttgacccatgccctactccagacctaattatatgcctattccaaaactaagtcacacacccaccacaccatggtagatctgagcatggccatatttcttataaaaatgggtggccctcaagcctaagaaatctccacctttttcctagaaaatctactcttttcctagcaaatctattctattctacttcctaattagaagacaccataacattagatacccagactctcctgtgcacaattcactctcccaagtatacctgcactccaactctcaagtgcatactttccctttgcaataaaagctttttgcttttcccttcattctgactcatccttgaattttttcttgcaacaatgtctacaacctggaacactggctgtggctgggagacctacctaggtcctcctgcaacacttgaatctattcaaaatccaaaatgtgcctaccccttaactcatcaattctccttccagggtatagctgtagaatacactcacacatgttcacagaatgacagacaggaagatgatcattgaatttaacttttgtctgcaatagcaaaaagaagtagaaggaggaggaggaggagaaataggaaacaaaacataatgtcctttaattattatacattatacattcatgccatagaataccagtcaatcattaaaacaaatggcataaatacatgttttggcatgaaaatatttgatatataattatatgcaaaaaatgttttacagaatgatacatgtagtatgaatacaattgttttaaaaacccagtcacaaactaccagaaatatatttgtacaaatttctatatatttagatgtaaatgcacagagaatggactggaattatggacttgttggcatgtgttacatacaaagagggaggtgggtgtaggagtggtaaagagacctattcacatctgtccacttatatttttattgtttgaatatagtatctcccaaaaaaccttatgtattacatgtgcaattgtagaaatcaataaattttaaaacaaatctaaaccaacaagaagtcgcagggcataaaagtctatgggttgcccaaaaagaaccacatatagccaggacccctaatcatgtctatttttaacttctgcatatgatcttcaagataacaggatgtcaaggctggaggggcctgaaagatctcaacagctcagcaaggggatctttcgggatgagtcacaagacatgggtttggggtcgaggcagagagcagaggataggatacagatgggtactccagagccgatcgacatttcaactcacctctaattttacctgtgcctcaaaatgactctgccaccttcagtattcttaaaccttcctaatgtaatattgaagaacccttccaaatgctgtttacttccaaataactcttccatacacccatggtatagcctctctacctgtatcttgaatgttcttttccctggtcacagagaactttacggcctccctagcaaccacatagtagatatacttggagacaggcttctgatttctacagacttcagactcttagaaacaataaaagctcctttcaaatttatttcttccattgttaaaaaatttaaaaagcaaacaaataaagcagagccttctctggatcccatcccagtttttgctcctcctccccgccttccaattctattactttatcttcttttccagaccaagccactaggggaaaaaaataataattctctacttctctctacccattcactgttttttttttctttttccccaggcagacaactgaattaggggatttattctacccaggctatactcagctacaaatgataggagaacccacctagaatggagcagatgcaaggcacacaggtgatgattttagttcattgcaaggtgggtgttctgtcagatgtgctctggacaataaaggatctgataatggaggtgaagtatcaggtgtgttggttgagtgagcaaattcccagctagcagcacagtccccagcacttgagtccacattccggctgctgtggcctcaatgcactgctcaaggtctgtttccttgaacccctgccttgcctttctcctcttgtcattcatttagcttacttttcccttcctctgattgaccctcatggcaaggaggtattagccagagtggaattagggctgggggacacctttttgtctttaattcctgcaaacctcactggcccactcatttgaactgatccgttttctccaactgcaaaattgaaaacatttactaaaaacatcttccttaaatattgtgaattccttactattgatcacactgtcttcctttctcttccctcatctctgacctttttttcttataaaagtggtcccttaaaagccaaagtttcatgtttctgtcctagaggtccctagatctttgtcttcctcattaaatgattaattcaacacaatattagtcatccaggaggcactcattcaatgtctgttgaataagtgaataaacatatgataattgcctacactgataagggtctgaccacaaagggaaaaaccagcttttgtctttgggtggccatccaaaaatccatggcatcaatgcatggatttgggagagggcatattggaggatacaagaaagaagtataattttcatgatattgtcctagccctcaagtcaccagaaaactaatatgtttaagaaaatgtgaaccagtgccactttgtgcagtgctaagtagaaatggactgaagtccagaaatgagaaagcagactatatggggccaagtccccttagggcttcatgtagaagcaactggaaagatgcagaagatccagacaggaagaaagagcaacatcccttcctaaaggaaagagtgagtgaagaaatcctcaagttccttgttagtctgtgggctaaaaacaccaatgaacttgaaaaacacaattagcattaatatgtgattttcaaatataatttccatgttcaactttcaacttcaaatataattttacttgtacctccacataaaacagaagctatacatgagtgggaggtcatttagtgggtgttggaaacagaatgaggaggacagaggacttcttagacctagcagggggaccatgagaccatctcatctcaaaagaccaggagatccaagcactcatagaatctaggcactggaagagcctaatgcatatccagcccatggtcccaccaatatccttgacagattgtggggtcgttcaacctcactcagaacatgaccaataatgggggagtgactggagcaaaaaaaaaaaagaaaagaaaagaaaacttcgggccaatatccttgatgaacattgatgcaaaaattttcaacaaaatactagcaaatttaatccagcagcacatcaaaaagcttattcaccatgataaagtagcctctatctctgggatgaaaggttggttcaacatacacaattcaataaattagattcatcacgtaaacagaactaaagacaaaaaacattattatctcaatagatgcagaaaagagttttgataaaatttaacatccattcatgtttttaataaaataccctcaattaactggctattgagggaacatacctcaaaatagtaagagctatctatgacaaacccacagccaatttcataccgaatgggcaagtgttggacacattcccctttgaaaaccaacacaaagcaaggatgctttctctcaccactcttatttaacataccattcgaagtccttgccagggcaataaggcaaaagaaaaaaataaatggcatccaaataggaagagaggaagtcaaaccatccctgtttgcagacaacatgatcctatatccagaaaaacccatagtctcagcctaaaagctttttaaactgataaacaacttcagcaaaacctcaggatacaaaatcagtgtgcaaaaatcactcacattcctatacaccaacaacagtcaagccaagagccaaatcaagaacaaactcacaatcacaactgccaaaaaaagaacaaaatacctaatgtatagctaagtagggaggtgaaacatctctgcaaggagaactacaaacaacggctcagagatatcagaggcgacacaaatggaaaaccttttcatgctcatagatagaatcaatgtcattaaattatcattaaataataatgattaaaacctgaatggtaaaaaaattatcattaaaataaacttctctctgactttcttaccataaaaactggccataaagaatgatctggcctacctttttggactgtagatcagaaaaccctcattccagagagtatcctgccctatacccagaaggaagaaatgctgctcagagaggccaaaaaggatctagaaagacgggcttttccgggtttccccactatgtctagtagcattagatcacatgctttctgtccaatcatatttctacatggctttcctactgtgtcggacctaagcacaacagtagacaattttctttgtatctttgtgtcttcattctgaaggtctcaatgtgcacacattgaataaatttgtatgcctgttctctaattaatctgccctttgtgagctgatttttcagggaaccttcagagggcaaaggggaacctatattctctggttccctataaaagaagaagaagaagagaatcttggaaaggtaagacaagagcagccaaagccaggcagaataatgtaagaaaacccagaaggagaaaatgccagatgctgaactaaggccaggttgcaagtttgccactagaatgggcaggagaagaatcctaaggaccccttgggttatggcagaaggaggaaataggagatgccaagaagggggtgacctccatccattccaggagcctaaatattgaatgcaagcatggaggaagcctgagtccagaaagaaaagcaggagagggccggatctgcctggagctcagaaaaggattcctggggatggtgccactgcagacaggtctcatggactggggggttgcagcttttactaataaaatttttaattgggggaaacaaaaggaaacttgagagaaggtgcacatcttcccttcttcctgcacataagtgactacccatgcctggctaagagcttgcaagcttaatcaagatacaataaccaatggtcattattgggtggggaaatgaaggtgcttgtggttatgaacagctccataagcatgaatccaggaaagagtggctctaagggatttgggctatagccttattatcagagccattcttctcatctttaaaataacctggcagggccttccaatgatcacattgtggcaatggtaattcagctttgtcacctctgctgtgatgacctgtcagttggttcatatgagctccaggagcatctagggagcccagaaggtgctgagccatccaaggaagatgaggttcaggtggaaaggtcaatggtgacatttcatttcaagagatctgaaagggatcacttccctttgacaaatgtctttgtatctccccgtgggctagaagaaccatgattcatacaagatctgagtctatggaagtagaggagttcagtgaagaggggagatggagctttataagttcagtctaaacattatcaaagagggggatacaaaaatctcaactgtgcaggaatcaaagactagagtacacacccagcagcaaggaaagccctggagtcacatggaccacctacagaatggggccacaagtgataggcaaatggcgaaagtcagtcatgctaggtcttgaagggcccattgacctcaggaattcagaagacgctcagccctgcctgtgtgatggagcactgtgatgaagaagtgggctgggagacaggccatctgcatggtagaactggctgctctgcatgagctgtgccagtggaaagtcacatggcttctctatgcttccatgtcttcctctgcatgacaagaataagaatatgggcagcttttaagggctgtaggaagtattcaataatataacgtgtgtaatgtgcctggcaggcagtaactatttagtcaaaattgggttttattacttcttactctatatatagcaatctgaggagcatggagaagttttatatgttcatttatccttctttggagcaaattagtgaagctggctcctctgcaccccacagtccttcccctgtcagtggcctgctgacttcccttgcgcttctttgtctttctgtgcctgaggaccttcctgggaaccatgtgtacagcagcctggaagtgctggaaattgccactatctgggaaagctgtcaaacaatgatgattccctttcaggggataattctgaggcaagtgctgttcatatttagtgactaaatatggctccactaggcttggaaatgtgtggtcaaactggtgtccctatttaacatgttgaggcacttggatagctcttgctcatggaagcctgaagcccattgacaggagctttggccctaatgtaggcatcttctcccacccttcctgctctctgcagcaggcatggatggctagatacctgctgtagtcttttctcacactgcactcaacatacctgtgaggccagtcactcagcaaagatgagctgagtataatggtgtttgcattcagcctggacctgatggcaatatttccatactctagtagagtttattagtgatgattgcagttattagcaatgattagtatgtcgttggtactatcagaggcttcttcgggtcacattgatctatcagtgctagacacatggtttcagcagctattggctgaggggaaatgtttagtggccaggaaaaggggcaaactggacttgtgttatatcttctattagctgtgtggcactgctcataccatctctgaacctgtttccctaaaccgcttatctcttatctggttataaatcaaaatagaaattttaacagacttcctaagctgtgtagggcagtattcataagcagatattttattattgttatgcctctgacaaagcccagtgtattctttttgaggttataaaataaaattcctacagcatttaagcaataagtaaaattgaacagatttaaaaaataaaactggtggagtttacaataaaatttgtataaaaattatataaaattatataaaataaaaattataaaattataataaaattatattattagtttaataaaactaacaatattaagcaggtaatataaataagtacacttgaacagatttaagaaaataaaactggtggagataataaaaacttaagggtgtatgccctgcctgaagacattcaaatttaaacaaataataatactgtgctattcaaacaaagtatgatttcaggccaaataatgccagtgtgtgattttttatgagttcctccaacatgctcaaaaaactacttttcaagatacaaatcccattctatcccagaatcagaagaccaaaaattttggatagattaatgaatgaagtcatcagctaaaggctgatctttttctcagacctgaaggcctgagttttattccctgcagcaaccaattgagccatcatagctccgtagctgcacatgatataggagagttgcctctttggtaaaaatttatctccaaaaagcaggggactaccattcctgttaaagtcccacagttgtctctatgccaagcatctataatttcttcaattattcaactgccctccctggaaatgttgacagcaccactttcacctgcatttctttagggaatcacagatcttacttaaatgtcctggtaactaacttttttttcacaacaccacttcactaagctaaaaaaggacattgccttcctctctttagaactcaagctgaagctcctcattgacaacctacttttgagagtcctaattgaactatgatctcaatactctctccctgccttcaggctattcactaacaacacctctttatccacacctgactgatgcctggactctctgagcctctgtcaggtcactgtatttagttagttgtaatacaaagaaagcactctccctaaattttctgtcatgtggatttcccccactgcatcatggataaaaatccttaggagtgtatataagaagggcgacatgctcagcagttaagaagggctaagtgccttgtagaggacttacatgatcaggtgaagatggtggggaacatgatctcttttccagcctttcagacatgaaataaatgtagactgtcttgctctatcatctagctcttcaagaaaagcagaaaatccaaaattttaaatctggggaacaaaaatatgcattcaaaaatacacaacaaaaaatgcaagagtatttttaaattttgcctaatagaggaaaaccaaaattttacagaaaatatctacaacaaactgggtggccaggtatccccatcaacccgaaaatttggacagatgggttaaacttcagacaaaacctcatggcatcaccatcttcttggaagaaggtgggagaaatgcagcagcttctgatggtcctgggagcatggaatcaatgccaccagcaggtgctcacaggatgcgcgtcaggtcagcctgaagcagcttctgaaaatgtgagcacgctcttcaggctccaatgtataaggatggctccactagaaggagaaacttttttgaatgtatccatttgatttgctttcattgtttacaaaaacattattctacttcatattctcttctataataactttgttttattttttattttattattattatactttaagttttagggtactttgtatgtgatttgactgcagttattgtgtcttgcttatttttaactgaaaaaaattttacttgaattttgagaaaaatggaaagggccaggagaaaattgctaattttatagctttaaagctacctcctcagttctttgcatgaaatctgtgtcttctgcttcaatttgatctggaccttattcaactcatagtgaaagaatatatcatgtaccttagaatattaacccaggacttttgactgaaaaacaaattttggtaaaacaatttaatttaaaaagtaaagaaaaaattattagagcttctggataaaatgatcaagtcacacataaaacaaagaaattcaggatttgggtgtctcaggttgggtttccctggaacagacactgaggcaggatttgtgtgtagagagtttattgaggggtaacctcagggtaaatacctatggggaactaaagaaactagggagaggagttgaactgtacctcagccacaaggatctcagctaatctcacatgtccttctagagctgagatggcccttcagagcatcccaccttgaaacgaggggacaggctttttatccccacttctaaattagcgagtcattgggcgaggactgtcaaaaaggaggagacatgtcctcggatgaaatgcctcttttcctcagaggacacgtcccagacaggaactcacctgagcgtggtcagctgccaaaactcccctagcacgtgtgactgcatggtcctgaggggacctgggggtgcacgaaaccattcaccacagattgcgtttaaactttttaaagcaatgacttatgccagaataaaatcaggaaatacattagaagtactaaggaaagaaagtgtgggccatagtaataactaaaattaaaaatggggggtcaactatggctattataaagcctgaatagtgtaaaatgcctgcagagatacattaaccgttctaaatataaaatgtgccaaaaaagagggcaaaatactcaaaatctagcagcctaaaacagcaagcctttcctgtctctcaacatgtgtggggcggaaatctgggtcatcattaacttggtgcctcctgctcagagtctcccgtctggcagcagagtgctgggtaggcgggcacttcagcctccactgaaatttacctccatgctgagggaaggcttcaggctttttggctaatgacatcacattcctgatcagtggacctctccacagagcaactcacaacaagcaatggcttccttcagagaaactgtcagaaagaccacccaagaagacagcacagcctctttgtaacctgatctccaaactgtcatcccatcctttttgccttattctattatttcaaagtgaatcctaattctggcccacactcaaggagagattacacaagggtgtgattatcaggaggtggggatcattaagcagtatcttagaggctgcctgccacaacttgtgaaatatagtgccccatacacatgtaccattattatgtgtcaatcataaattttaaaaatacagttttttaaaaatttaaaaatttaaacattattctgctttttaaaaatagaactgtacttcagattagcctaatatgactatattaagaattaatataggccgggtgaggtggctcacgcttataatcccagcactttgggaggccaaggcgggcggatcatgaggtcaggagatcgagaccatcctggctaacacagttaaaccccgtctctactaaaaatacaaaaaattcgccgggcgcggtggcaggcgcctgtagtcccagctactctactcgggaggctgaggcaggagaatagcatgaacccgggaggcggagcttgcagtgagcagagatagcaccactgcagtctggcctgggcgaaagagcgagactctgtctcaaaaaaaaaaaaaaaaagaattaatataaataaatacaataaaaatataaatataatatattaatataatatataaatataattaaaatattccccatatttcagccaataataaattaaagaatctagacaatgaccatcaacgatgcctaacatcataacaaagatagtttgacctgaggtgcttactgaggcagatgcacagcttgacctattttgcagtcttcccccaaaatcatcaaacctaaatctaatcaagattctagatctaactacttatttacaagaagtacagaagaaacaacactataagtaagcaattagcatacttcagaatgtgggaaactacggtaactactgatttcttcaacaaaagaatttcaaggcaaaataaaagagaaagagatggagaacttatgaaaagagacatcaaaagagtcaagaaaaacatcaaccagttgcaacatacggactttacttatattgtaattcaaacaaacaggtacagttataaaacaatcaggaaactgtgaacactaacatgtaatggtacaaaaaattattgggatttttaaagtataaaataatattgtgattacaggttttaagaaatttcttatcttttagagatacgtttttagttacagataaaatcgtatgatatttgggatttgcttcaaaaataatctgggtgtaggtcagttggtgggggtatagatggtcatgagttgaacacttttgaggctaggacatgggacataaaagtttatttcaatcaaacaaagtcattgtaccgggaagaataatacctgtgtaccaaatgtggtcagttgaatatagttttgtgatctttggtctatacacataaaatggcttaaaaagttaattaacctgtaccactcaattcattaaacatttagtgtgtgtaaatccttgttaagtttgcatgaattgaatttttatttgagacagggtctgtctttgttgcacaggctgaagtgtagtggctaaatcatggcttactgcagccttgacctcctaagctactactgccgctggcactttcttgcaagtgccaccttctgactggagaccaacgaacactgtccattacaacatctccaggcagaataacacggtgtccaggaaggagaaaacatgggcatgacctcagctatcaccattgcctgcaccatcctggctaaccaggaggtccctagtatatccatgagatctgttcattactaccacaactggcatttgagaaagccaatatacagaggctatctataaccaaggaatctcacagagtctatgtcactcccctgccaaccccatcagggctggtgctggttcccactactgggagacttaaggataggttacatcactggatcccttgaagacattccacagcaccagcctggagtgtggcagcgacacaaggcagctagactcagaggagcaacaacatgtgcagtaacctggctctgagagactccgactcctaggggaagagggagtgaaccacatgaaaggaaccctccataggacaaaggaactggacagcaggacttgagtctcagatcattccactggtgggaagtgtctttcagcagaaggtcagttgtagtgcgaggctcagcagggaaagtctgcagctctctccagctgccaggcagttctggtgctcatgaaggagcttggagaagaaggctttttcccccgcatccaccactgcagacaccgctggggcttttcccattggaaggcggtgtgggtgcacctatagacagcctctctggaacacttcagagcgactgcatccccccaggaaaagcaccatccacgtgcgggcctgcacaaggggtagagtcacaatttctttctacttggaacatcaccactcccacagatataaagaggcacctgtctgatctgaatagctggaacactggttatggagtgtgtctgggaggtgaatagcattcctgccagcctgggagaagagctgaggtagctctggtccttccctctgataagacctccgtgtgtttcactgaaagctcccccatccactctgtaaaagctgagacctctgcccatgaaagggtactgcatctgcccacctgctttagccatagacaatttctacctgtggatgcctcctctattagcccgaagcctaaattattcaacccagtaaataaaatactagggaaattagaaaaataaataagcgcacaccacagaagagtgaaataagcttcaagagacctctgccactccaatcccataggagagaatgaacttgctcacgcaccaagcacattgctactacaataagcatccaagaaaggcatcatacaaagactgtctgtaaccaaggaactcttacagagtcttcacctctgaaagcactaagagccaaattagtttgcaataaactgtaaatgttaaagtcatatccttaaaggggaaaaaattaaaaaaaaacagtcaaataaagaataaatgctagaataattataaaaaatagtctatccaaatgacaaggaaccagaaaaataaatctggcaatatgacaaatcagggttctataacaccccaaaagatcacctcagccctctagcaatggatgcaaaaaaagttgaaatatttgaaatacgagataaagaattcaaaaggttgattattaagctactcaaggagataccagagaaagatgaaaaccaacaaaaagaaatttaaaaaaaaaactattcaggatataaatgaaaaattgtctaaagagatcgatattttaaagaaaaaccaatcagaacttctagaaatgaatggcacatttagagaattacagaatgcagtgaaaagttttaacaatagactagaacaagcacaagaaagaatttcagagcttgaagacaagacttttgaattaaacaaatcagataaaaatatagaaaaaagaatcaaaaatataaatcaacaaagtctccatgaaatatgagattatctaaaatagccaaagctaagaataattaatgttcctgagagagaaaagagagcaaaaactttgaaaaatgtatttgagggaataatagaggaaaacttccctggccttggtagagatttagatatccaaatataagaagctcaaagaattcatgggagatccattgcaaaaaagataatcacaaaggcatatagccatcaggctatctaacatcaacatgaaaagaagaattgtaagagcagtgagacaaaagcatcaggtaacctataaagaaaaacccatccaactaacagaagacttatcagcagtaaccctacaagccagaagggatgggggtaatgttttagcctcctaaaacagaataactctcagctaataattttctatgcagcaaaactaagtttcataaatgaaagagaaatagtgtcattttcagacaaatactgaggaaatttgttactatcaaaccaaccctacaaaaaaatggtaaaaggagctttaaatcttaaataaaaagcttgatgtgcacaaaaataaaaccttttgaaagcataaaactcacatggcctacaaaacaataaaccaatgaaataaacaacagcaaagtattcaggtaacaactaacatgatgactgtaacagtacctcgcatcttgatattgttaaatataaatggactaaatgctctacttaaaatacacagattggcagaacagacaaatatcacaaataaaatatttgctatcttcaagagactcacctaccacatcaggattcatataaactcaaggtaaaggggtagaaaaagacattccacataaatagaaaccagaagtgagactaaagcaacaagaatagaaaaataaaaagatggtcattatttaatgataaaagaatcaatccaacaagcggatattacaattctaaatttatatgcacctaacactgaagctctcagatgcataaaacaattactactagacctaggaaattaaatagacaacaacacaataacagtgggagatttcaacactccagtgacagcactagtagattatcaggacacaaaatcaacaaaggaagaatgaacttaaactgcattctagaacaaatgggtctaacagatatttacgcaacattctaactccagaatagaacaagaactccagaatatacattcatcttatcagcacatggaacattcaccaagatagaccatatgacaggtcaaaaaacaagtctcagtaaatctgaaaacatcaaaatcatgtcaagtattttctcagacctcagtggaataaaactagaaatcaactccaaaaggaatcctcaaactatacaaaaaaatagaaattaaacaatctgctcctgtgtaattttggagttaacaatgaaatcaagagggaaatttaaaaattatttgaaattaatgataatagtgacacaatttagcaaaacttctggaatataacaaaagagtgttaggaggacagtttataccactaaatgtttacatcagaaagtctgaaagatcacgcacagattgacaacctaatgtcacacctcaaggcattagagaaacaagaacaaactgaataaaaagctagaggaagaaagtaaacaacaaagatcacggcacaactaaatgaaattgaaacaaaaaatacaaaagtttgatttaaaaaaaagctggttctttgaaaagataaaccaaactgacagaacattagcttgattaaccaagaagagagaagattcaaataagctcaaatagaaatgaaactggagatactgcaactgacaccacagaaatacaaaagattattcaagatcctatgaactgatctatgcacacaaactagaaaatttagaggaaatggatgaatttctgaaaacatacaaccctcatatattaaatagggaatacaaaccttgaaaagattaataagaagcaatgagattgaatcggtagttttaaaaagccaacgacaacaaaagcccagggccagatggattcacagctgaattctaccaaacatattggtaccaatcttactaaaaatattccaaaagaagaataggggaaatactccctaagtcattttgtgaagcaagtatcaccctgatactaaaaacaggaaaagatataaccaagagaaaaccccacagaccaatatccttaatgaacatagatgcaaaaatcttcaacaaaatactagctaaccaaatccaatagcacgtcaaaaaaataatataccatgaacaagtgagttttattccagggatgcagggattgtttaacatatgcaagtcagcaaatgtgatacatcacataaacagaattaaaaacaaaagccatatgatcatctcaatagatgcagaaaaatcattctataaacttcagcatcttttctgataaaaccttcaacaaactaggcatagaagggacttacctcaaatgaatcaaagccatctatgacaaacccacagccaacatcatagtgaatggagaaaagttgaaagctttccccctgagtactggaacaagacaaggatgcccactttcaccacttctgttcaacatagtaatggaagtcctagccagagcaatcaggaaagagaagaaaatatagggtttccaaataagaaaaaaggaagtcaaactactactgtttaccaatggtataattgtatacctagaaaaccctaaagactcctagatttgataaaggagttcagtaaagtctcaggttacaaaatcaatttacacaaatcagtagcactgctgtacatcaaaaacaaccaagttgagaagaactgaacccctttcacagcagctgcaaagaaataaaacacctagtaatatacttaaccaaggaggtgaaagagctctacaagcaaaactataaaacactgctgaagaaaacacagttgaaataaataaatgaaaacacattccatgctcattgattgaaaaagtaaatatcattaaaatgaccatactgtccaaagcaatctacagatttaatgcaattttcatcaaaatacatcatttttcacaaaactagaagaaacaattctaaaatttattcggtaccaaaacagagccccagtagccaaggcaatcctaagtaagaaaagcaaaagtagaggcatcaaattgccagtgttcatattttaccacaaggctgtaattaccaaaacaacatggtactggtatgaaagtagacacagagaccaatggaacacaatagaaaatccagaaatgaagccaaatgcctacaaccaactgatttttgaaaagcatacaaaaacataaattagggaaagaacaccctatttaataaattgtgctaggaaaactggctagccacatgtagaattaaattggatctctatctctcaccttgtgcaaaaatcaactcaaaacgtgtcaagtacttaaatataagaccccaaagcataaaaattctagaagataaccttgaaaaaactctcctggacattggcctaggcaaagaatttatgactaaaacctcaaaagcaaatgcaacagaaacaaaagtaaataaatggcacctgactaaattaaaaaggttctgcacagaaaaagagataatcatcagagtaaagagacaacccagaaaggaagaaaatatttgcaacctgtgcatctgacaaaggactgataaccagaatatacaaaaaaagaaaaaaaacatctcaaatcttcaaggaaaaaaataattccatcaaaaaattggcaaataatatgaatagacatttctcaaaacaagatatacaaatagccaacaaacacgagaaaatgctcagcatcactaatcatcagggaaatgcaaattaaaaccacaatggagcaccaccttgctcctgcaagaatgactattattaaaaagtcaaaaaaaaatagatgttggcatggatttggtgaaaggggagtgcttattcattgatggtgggaatgtaaattagtacaacctctataaaaaaacagtatggacattctttaaagaactaaaagtagatctattattcaatccaacaatctcactactggatatctacctgcattagttcgttctcacactgctaataaagacatacccaagactgggtaatttttaaaggaaagaggtttaattgactcaaagttcagcatggctgaagaggccacaattttagaattgtttctcctagttttgtgaaaaatgatttatttcaaaacttacaaccatggcaaaaggggaagcaaacacgtccttcttcacaaggccacaggagagaaaagtgccacgcaaagggaggaaaaaaaccttataaaactatcacatctcatgagaactcactcactatcatgagaagagcatgagggggacctcccccatgattttacctcctacaaggtcactccccaacacgtgggaattatgggaactacaatcgaatataagattcgggtggggacacagagccagatcatatcattattccaaagaaaacaagtcattatacgaaaaagacatatgcacatgaatatttattgcagcctgattcacaattgcaaagatatggagctagcctaagtgccattgaccaataaatggattaaaaaggcatgatatataaatatatatatggatatatatatggatatataaatatggatatatatatgtatgtgtatatatatatatatacacacacacacacacaccatggactcagccataaaaaggaacaaaataatgtcttttgcatggacttgtatggagctggaggccattattctaggtgaaataactcaggaatggcaaatcaaacactgtgtgttttcacttataagtgggagctaaacagagaatacacaaaaacatatggagtgatgtaatgaatcctggagactcagaagcaggagattgggagggagggtatgggataaaaaactatatattgggtacaacatacagtacttgggtgatgagtgcactaaaatctcagaattcaccactatataattcattcatgtaaccaaaaaccacttggagatgggcatggtgactcacgcctgtaattccagcactttgggaggccgaggcgggtggatcacctgaggtcaggagttcgagaccagcctgcccaaaatagtgaaaccccgtctctactaaaaatattttttaaattagccaggtgtgatggtgggcgcctgtaatcccagctacttgggaggctgaggcaagagaattgcttgaacccaggagacagaggttgctgagagctgacacagtaccactgcacgccagcctggtcaacagagtgagactccgtctcaaaaaaaaagaaaaaaaaaaaaacccttggaccccaaagctactaagtgtttttaaaaaatcaaaagtaatacaaaataaaggataaataagtactgcaattttttaatttgcaaattttctctttattatgtttttcaatgttctggttacagaattaatatttcttataaaaattaaaatgatacatgaaattttttaaaaagatacaagaataactccatgcctttaagaaaaatgtgatacagtgacaaaaataaagcacatacacataatggctcaaggaagcaagtgattcatgacatttgattgaagagcccaagatttcagaagaggctattgccttctgcagaaggcaatgagaaataatgccaagaaaagttggctagtcctgaagggtaaacatcatatggataggaagggagaggtcatcaagggtaatccagacaatgagtgacatgatcaaaactgcagaagcgcaaagacaaagagtgtgcttgttgaataccaagttgtataggctgcagaagaggaagtggtgggactggagtctagagagtcttgaacaccaggtttgggaggctggagttcacttggtgagcaacaatctctggcagaggaagactccgtctcaaagaaagaaagaaagagagagagagagagagagaaaggaaggaaggaaggaaggaaggaaggaaggaaggaaggaaggagggaaggaaggagggaaggagggaaggagggagggagggagggaggaagagagagagagagaaaggaaggaaggaagaaaggaagagagaaagagagagaaagaaagaaagaaaagagaaagacaaagaaagaagaaagaaagaaagtagaaagagaaagaaagaaagaaagaagaaagagaaagaaagaaagaagagaaagaaagaatgaataagaaggaaagaaagaaagaaagagaaagaaagaaagaaagaaagaaagaaagaaagaaagaaagaacgaataagaaggaaagaaagaaagaaagaaagaaagaaagagaggaaagaaagaaaagaaaaaaaggaaaggaaagaaagagatcattaccagctgggcacggtagctcatacctgtaatcctagcactttgtggggccgaggcgggtggaccaggatcacctgaggacaggagttatcattttgaaatcagcctgggcaacatagcgagaccctgtctctaaaaaatttaaaagaatgaaaaaaattacccgggtatggtggtgtgcatctttaatcccagctacttggggggctgaggtgagagcattgcttgggcccaggaggttgaggctgatgatcacaccactgaacttcagcctgggtgacagagcgagactctgtgtataaaataaaataaaataaaaataaaagtaaaataaaataaaattaaataaaaattgcctgttaagtcactatgagaaagcaaacaactatttaccagaaacaagagacattgttaccaagactatgtcactaaaataacaggctacagggaggctagtttgaatattgtatataaataatcacattagattacatttgatcaagatacggcttatataatccctgtatgatcttaaatcagagtggaaatatcagaacaataaatttgcctgcatctaatggttttgccaaacaatagagtgagaagtagaggtcattcagggtaggaattttatcaccagccaattcagatatgtctggtgccttgtcatggtttcacctgaattatcttttttggccataatttcaccaactgcattagattatggcaggctactaatacccaaatgttctgtgtgttttggtaatatgagaatgtaatacagaaggtagaccaaaaagaaaagatagacaaattgtatttaaaaagcaaaaggctgatgaagattatgcttaccaagtgccgctcttaaggctgtctagccaataagttaaaaaaacagtgagccgagatcgtgtgactgcactccagcctgagcgacagagcaagactccatctcaaaaacaaaacaaaacaaaacaaaaaatacgctcaccggcttgttttgggggtcatatgatccaataggaagaagacggacttcagagcaaaaccaccctggtttgatcccagctccttctctagtcagctatggacatggggtacttacttaacctttctgaccctccattcattcatggcaatttggggtttatcgcagcatatttgctgtaaaaactgcatatattgtttcattcaaagtacatacaacaggtctggaattcaatagatggtcatctaatgttagctccttcctcctcatcctttttatattgattctgaaagagatcttattgtataattccttatgctatgagggaaatttaaatacaaaatactaaaattttcacataagaaaatcacagtatgaattttacttatttcaacttttagacacataaaagacacaaaattcaactaaagcaagctatgattattaatgaggaaatgaataatgaatgcgtgggttgagactgcgtaattggaaatggggcaaaaggactacggtttcactttccttcaaaagtttgatttgccaacttaacagaaacttgctaacaataaccagttttagaagctcctggccacagtgaaagcaaacccagtccatgtgcctggttcatgaaaggctaagagttcggggagaagatggggagagggtgtgactgagacacatccagagagcacactgtgcctctcacatgtactgcctggtggcttcactctcgtgggtatgtgtacccgcactcaaatgtaaataccaggtcccaatctcacagggctcttgcgggtacacaattaggagctctgagtgcacttggaggaagataaagaatcccaaccggcaaactttcaagtccatcttttttttgtttgttttgttttggtttggtttatgtgttttttgtttttgtttttttattatactttaagttctagggtacatgtgcacaaagtgcaggtttgttacatatgtatacatgtaccatgttggtgtgctgcacccattaactcgtcatttacattaggtatatctcctaatgctatccatctcccctccccccctccccccaccccatgacaggcccgggtgtgtgatgttccccttcctgtgtccaagtgttctcattgttcatttcccacctataagtgagaacatgcagtgtttggttttttgttcttgcgatagtttgctgagaatgatggtttccagcttcatctgtgtctgtacaaaggatatgaactcatccttttttatggccgcatagtattctacagtgtatatgtgccacattttcttaatccagtctatcattgattcaagtccatctaattgtaaagtcttctaaaagagtgttgtcctatattgtaatcacccagcactcagagatgaaatcttcatgaaattagcgtactctctccacaagtgaaagcatttatggctgtgcccccagtcagtaaattatagcagttggtgctgagctccaatgctgtttcccgtgctggccctgccccttccacttgttcagcaagccccacgggtgctgtgtctgattcgcagagaccattcactggtccatttctctctcatctggtggtgtcctcttccccaactatttgaactcaatctctaaacatttgtgccaccttatctcttgctttggtctcagctgggcaaaactttactgtttttcagggccccagctcccacctgaatttgctgtctctcagcctcaatgcctgtagaattccaagattcagaactcactgtggacccaagcagccatggcaatcttccaggaaatgatgggcacacccttgtcattataggatgagcactgttaggataacagaaaagaacagagagttcctaggggttattttgtgcatgatatatttattaatgatgggcttattctgtggcttaggaaatgatctccagtattagttgaatgccatgcagaaaaacaggatgttggcatctctgcacacagtagatacattctaagcagggtctgttcaataggcaagatgaatgtggctctctatccctcagtgtttgccaaagctaacagaaagggcaaaggctaacaaaattctgagggagcccagcaaagatatggtcttggtgaaaaaaaaaaaaaaacactgctaaattgcctgagccaatactctattttgctcttactgcagcatagaaaaacattgagactaattctgtacagctacactggagttcaaatagtgaaatcctatgagtagtggaaattaattcattcaatttccattttcaacttgtatggtttttagcttacttttgccatacttgaactttcaaaggagaagctttgttcataatagtcataaactggaaacaaaacaaattttcaccacttggaaaatgaataaattacagtgttttcataatgaaatacatatattcagagcaatagacagaacaaactgcaatatagagatgcacaagaacctggctgaatgttaaaaatatagtattgtgtaaaagatgctgaagaccagaagtttgatcagtatggagtcggcctattaatatgaaactcacaaaaaaggtaatagtattgatgatgatggaaatcagcatataattatctctgcaggattattaagtgaggggaaggcactgaaagctcatatgtctcaggccgggtgcagtggttcaagcctgtaatctcgcactttgggaggctgagtcagacggattgcttaagctcaggagttcaagaccagcctagacaacatggtgagacctgtcctctactaaaaaaaaaattaaaaagttagccaggtgtggcggtgcatgccttactgatccatttacaacctggcaggatccatgatgacaccagccgtttcaccaaatgaaacaataactcaagaggacccttggagtgacgtggcacctgctggcctcccttgccttttctgcattccaaaccctttattcaaagatgcctgtgttccctccacaaactaaagagtggaatggtgctctgctctttcccttgccagcatggatagtaagggaatcttgcttcctcttatcataactcgtgattggtttgacttgttttcacaagcggtgagcagctggacccctttgccggttacaatcgcttggacatatgtttttaattatgatgacttctaactatggagctctttaaaaggaaagaaagtccgctcaagtctcttattaccagatgttagctgggacaaacagctgatattcctggctcctgaacctttaccaaagcaatctctcaagtgaaactagtaagcctcaaccaaggttatgacttaactgaagacacgagaggcatctccacagagttgcaaagcagtcctcacaagactcagaatcactgaaaggcagctcaaggaaagtaaagttctgctggccacaaatgggatacaccttacattttgttcagccattttctctagggtctcagcttcccagctactgtctacacacagaggccccaaagccctgtaagcctccacagattgaagacaggaaatcaaaagctgttcctggaagaaaaaataatcaataaatggcaaaagtcacacaaatattaaaccaaaaggactgattccctgattctgaattttaaccacgaaattacagtgtggaccagcttccattgttaatcccacatggactccaagcaggcagcctgagtgggcacagggtttttagctttgttttaggtcattttggtctgtttgtcaaaggaattttaagggtggtcatgacactatttatgtcttttgcttttttgtttatttttaaacttgatcctaccatcttccttaaccatataagccaataaggctcattatggtggctgatcagagattgccccatcagaactaaggctctctacaccctgcccttagaactttgcttctgccttagaaggtatatatataaataaaactaagtttctctataccttcactcactcactgggtgaaggagtctctttgagtgctcttagcatgagtgttcccacaacaccttatctttatggaccagctgagtctgactgaactgggaaggacccccaccaaacccggggccaacagggaaggtcccctgcagggtccagatggaggaaaccagaacagggactggggagagaccaagatgaaatgaagggaagaggtagagagaaataaagtctctgaaatcttcaaccttaaagcaggagatcctagatttagaggaacttacatggtgtctttccagtgcagtgggagagacaactgacctgtaggcctctgtgtggtgactcccagtgatgccaagagaccctggggttctccatggatttcatcctcattaccagatatgttcacttaaaaatatacaatctataaatttagaaaagaaggagaggagactttatttcttataaagggttacagtctgcagggtggccattctaacagactgggaagcagagcctccagtcagaagccagaaacagacatttcagaaattcactctttacatgctcaacccggcatcatcaccttgatctgcttgggtttcctatccctacactgtcctctggaaaactcctccagaaaaaaagctggggcatagggccctcctcacttgcctcccatgtatctggaaccataattgtacactgtcagcattaccaatgcaggcacagtgcttttatatatttgtccaatgtcatcacggtctatcacaggacaatgagttcagtacccaaaactatattatgacctgaagaagagctcctactaaaggattttaatcaagagagttctataataccataagttatagtttttcctcctccaaaatttacaattagtagcagggacaggtcttgacacagttaacacaaggaagactagattaaatgcaaaatatatccaaaaacaatccactttggaagatgttaaaccagccatgtgctatcttgttccttaattggcaatatgtgcttctcaatcttgccagaatgtaggtttctcagtcctgctcctcttctatctttagaatcagtgctacatacacccctaggaactcaataaagacacacacgtcagtggattcgcactccaatcaaggagctagatgcatggtccagtgcaataagaggagcctagcttctccttgacccttggatagatcacccccaccttagaacaggatggtggagactgcaaaaatgttctccaaggtcctggtgagaaagcctctacatcagagaccttgtctgttaaatagagagtgagtgtagccctcacagagtgaacagttgaattctcatttgtcatattctgcattagaatgtagtagagtaattatgaattaccttttcattatgtatgtcaccccacacatcttcctatatcacccagcattaaaacacgctgattgaaataagaacactccactttaaagtgcttgtctttatgcacagtgccctagaacaaaccagccaacctctttaagtctcaataatttgatatcttaaaggcatttattcaaactcttattgcatcattggtccatttcttttccttatcagctctgtaagttacccaggccaaaaactctggtctcagtttaaaaaacccaaagttcagcaacttgaaacgtgaatttaaacagaataaaagctcatagcagtagggatcctggctcttacttttccttataatggagatgaacataatatgtgccctaaatggattgactgactgattgatggataactgattgattcaccgccatgtaggaaattatatgcagatctagaaccaaaatatctgctatctcatttttaatttcaaaaatctaattgaaattggccaactttatcccacaacagaaacattagcaccaagcctaggatgtataggggtgtattgagaaacaaagatgagattgtctttggttaatggtttcttaacatttcttcctttgccacttccatctaaacacagaacaaaatggaaataagattatatgggatagggctagagaaaagagagagaagtaaatgtataggtttcttcttctcacttttttttttttttttttttgagacggagtctcactcagtcgccgaggctggagtgcagtggcgtgatctcagctcactgcaagctccacctcccgggttcatgccattctcctgcctcagcctcctgagtagctgggactacaggtgccaccaccatgcccggctaattttttttgtattttcagtagagacagggtttcaccgtgttaaccaggatggtctcaatctcctgacctcgtgatccgcctgcctcggcctcccaaagtgctgggattacaggcgtgagccaccacacccagctcttctcacttttagtctactaaatatttgtgtaagaataaagtttacaaaggtaagagagtaggtcataacctctttcttgtactctagacaaacagacagacagacagtgaggctgtgcttggacacaggcctgtagagctagtccatccctacgaggctagagtgggatttcatccattcaatttgttatagtaattccatatcaactctctcctaggctcttaacctccaggaaatttccccagggtaaaaggtcctagcctcaccatctgtttatcaggcttcccccatcaattcctctgaacattaaatctttagctccaacagtgggttctaattaaacatttacaatttttatctttggttattctgttgttcctagcttatgcttggtaattccagctaatactattccctgcttatgataaatttattgaagtaattcttcacttttttcaaaaagagggcttattctccattcattgaacctgagatgaccttataacttgcttttgccagtagaatccagaggaggtaacacggtgccatctccaagcctgtggctcgagaggtcgggtaagtttcctcttgcttgtagttgaagctctgcctccacaatgaaacacgactgagccagctgctataggaatatgagagacatattacagagagtcaagatttccagtccttcaaagtaaggccaccctggatcagccagccagcagacacgcaactgacctcacacttatgagcaagctcatccaagatcagcagcactgctcatgtgacccacagacctgtgaatgaaaataaatggttgctatgtgaaaccaccatgttcagagttgcttgttacacagccttaattatagcaatagataattgatatgctgttattaccttatgtgttaaggtttcatttatgtttataaatacaaatacatatatggcataatatctcacatccaatataagtaacttcctaatgtgttatatctacaaacaaaagtttatttgtaatagtggcacaaaacacttccatgaaagaatgagccaccacaaatatgcattgagcaaaatgatagaatctctggtaaattgaggattatctacagaacccttttcttccactctcctgaatatgtcatgtagacattcattaactgacttattcagcagctgcttatgatgcacctgcacacactcatccctgagtgaggcatcgcacagtctgtcataaattctgctgaggaagtttcaaagccagaatctatggctttaccagaggcagaattgctctcagggatgcgaggtgacctgtctcccgagcgtacttgaggatgctaaggcaggccatagagaggaagctccctttctgccacatggcaatagtcagcgatacacttccttacctgagtcctctcagcagacccttaagttagtaaaataaatataaactattatatatccagaagctatcagtattaaatagcagtaagccagcaagcagaagctttatatcacaggggagactgaaattaccttggcaccttaccctacaaggaagctaatatcataaagtgctcaaaatacttttctgaaaaggtagccttcctgtgctcttctgagcagctgaaactcatagtactggctccagttctagatcagtttgaggcagcttgcatctggcaatttgagaggtaatgtgcttccctgaaagtctgttagaaaaaaatgagtgtcatccttgccaaatgatgggacaatttactctcaaaacccagcatgtgttgagtatcacaattctgagacgagaaaatattatttttttctctagttaaaaacatgaagtgtttttgcaaaaactaatgaaatgtttaatgcttgtctgcttacagaaaagaagctctttctaattggaaaacagccagcaaagttgttaattccaaaaaacaagtatgtctctggagttaaaaaattttctgtaaagagccacagtggctttgccatctctaacacactccaagaactagtatccttgccacacattcccgaagagattaatgttatattggagtccttagaaacaagaacataccaatcatatccttcaatcagtctcaacaatgaaaagcctgagaggtaggaatccagaagttacctgacagccaccacctaacctgcctgccccagggaggaagcaccttttatgattctctaagtacaaatatggggtcactgggagttgtcttttaactttgcctttgtcttctctgttaattgtgtcttaatatgtctgtctttgcactttgatttaaacagataaatagaaataggattgaaagggacacagatggtgagagagaagagagagagaaagttatgtttaggttctctcttctcgagaagattctggatgtagtatggagcaaacacactgcgtgatcaacttcatgagccacttcacttttgctttctgtttaaataagtaggcgtggcctaaacctagattctatgtgccagacactttacaaggattatgtaattaaattttcccagcaatcttataagagggttcgaaaattatccctattttaaaatattaggaaatgaaaactcagagatgataagggacatgtctgaggctacagcaggagggcagccaggctggtattcagtcttgtctcatggcaaagcctgagtgctgaccatgctgctggactgccttctccatgtcttctgatgacagaaggcttccaaccttgccgccacacatgccctgcacacacattccccttctacatgagtgtgggccttgctgcatctgtctggacagacgtgatgcccttgactgtgggtttttgctcctgcaagtctcttcatccttcactgcatcaatatctgttagacatcttacttcctgtcgcctgttcacactccacctgtaacacgggagcatgtctagacctctccctagcatgggtcccacaataactggtctattccacctggtaatcaggcagagcataagagtcctataaagcataaagaactgtgacatcctgtttacctcaatagatcaacaattcttgagatcaggatctattcggctcagtgttatgtacacagtaattgctcaagaaattagtctggggagtaggaagaaaaagcaagcttcagccccacagccatctgtctcctttattcttgaatctcatctgacttgtccactgtggtatcctcagagcacagggcagctcttggtacatggtggatgcttgtcaaatgtttgtggaatgaaggaaagaagaaatctaattatccagaaagaatacaaacaaggtacttgagccctgtttttgagtatgcagggtcagggtccccccagtctgggtccagccttggtcctgcctctcgttatggtgagactgacccctcaaaatctctcattcttccaaaagatggtaacaattgtggcatctgcctggcagagacagtcgtgctcaataagtaactcatgggtttcccattgcttcacagcccctttgcagtttgtctgggctatctgaagatttctggccaatagtttgtaaggggaattggaacacttcaattctcatctgatacatttaaggaaagatacaagttctccacactttgcttccaacttcacagacaagagatctaagaacttggagatggagagtgacaggaagggaccagctcaatctctgagtttctgctggagaaggatgaccagggaaactacagcagactgtgatatggtaagaaacacagccaacttgtgtcagattgctgagatttcaagatttgcttattactgcagcataacctgtcctattctgactaatataatctgttctctggaattctgaggattaaagtagataatgaacatcaactctagttcagtgtctgacacatagcagtactcaacacaatgtagtcattgttactatcattattattgtttctactaatatgattattattattaccactcttaatgttgttatcattaccaataactgtggaagccattatttttcatcttgatttatccctctccttgtctctgtctctctcacacaggtacatatgcccatggagataaacaaggttgcaggattttgatgccatttctgacccttagagctacctgcttagtgatagacactcacagaaattaagagctgggaaacagtcaggtattacacataaaatctccggagaacttttttctggaaccagctctgagaccccagctgacagttccctctgcttgttccttcacaaaagcgcagacctggtttgctggttaacaattatacattttaaacagttctgtgctctggctgcatcctcaaatgcctctgaaaaataagcacattttaaaaacacaaaaaagaataaacaacaagacagttcagcaagagaaagaaaaacataagccactgcttcattacagagccatgggcaggcctctcaaaggcagcagcttttataaatgatttcttggaaaagcttttatgtcttcaaagtgtttctgctaaaagaagctaagtgtttatcttgtgtctcaggagaggatatagcataaagtccaggtcactaaaaagaggtattctgagctcttatttatgtgtcaggcctgggaagccagcttcagaagctggctcagtgataaatcatccacatggttgctgcatctctaaacaccgcatctttcattacatcagggagttaataaatattatctattttatcaatgaagggcagtgcctttgactcagataattttattgtagaaaaagacacagtttgttgattttttaaaggttcactttaaaatatttctgagatactgagtcatttgtagggaataaacactaagccacaaaactcaaggcctagacagatattacacagcaatctttttgaacaaattggctttctttgccttttctttttggcccgttgtcttgggtctctagggaactgtgcctatgaataatgtctgtctggatgcaataaagggccagctaagtgggagaaagggtggtgtgagaaaatatgacagcagagattatcatgagttctgatgagatgaagtttaggtttgggattttcctgcttgaagatgagcctggcccttttgggctccaaactccttattgagggcatcttgctatctcctgtatctagcacataattagcctagaatatatctggtgctcaaaaatgaatggttggatgaataaatgaatcaatagggtatagccacttctcactttttatcaaagaatcccctgggaattcacccataaagcatgctattataaagctaattgcatttccccacaaaaacaatgcctttattggaggtttgttctagaccaagagctcaacatctaataaatcagagctatgacaaaactgtcttaagcacaactttgtaatagatgaaaatctctttagttgtgtgcccaagccccatgaaactacactgcttatcttgagtatgcaaagggacccatctgtgactctctacatgttcagctattctgcattacaaatgtaattgatacgtaaaccctgataaaaaattaacacatacagaatcataacattgttgtcctctgagtggatagaaaggtttgagaagtgaatttggatgacaagtatttaaattttacacccaggccgggcattggggctcacgcctgtaatcccagcactttgggaggctgaggcaggcggatcacctgaggtcaggagttcgagaccagcctggccaacatggcgaaaccctgtctgtactaaaaatacaaaaattagctgggcatggtggtgaatgcctgtaatcccagctacttgggaggctgaggcaggatagtctcttgaacccgggaggtggagtttgcagtgagccaagattgcgccactgcactcccacctgggggacaaagcgagattccgcctcaaaacaaaacaaaacaaaacaaaatttacacccatgccacaacacccaagtgccactcatcgtttcttgctgaacaattgtattatttactgactggcctcacattttatgtcttttcttctccaatccatttacacatagtaactgctgtgattgtcgaagaacagtaacctaatcttacactctgcttaaaacgcctcccacttctgttaacaggctcttttcagctcttcaccgtggcctttgaggtcttcctcatgtaaccctgagtgtgtcctgggtctgtaacacttgcatcaccctccaggctctaaaccaaggtgccctttatacattctattcctcaaatacacatttgtctctcgttccttgtgctcctgcttctgcctgtaactctttctttttttgccagtttctagttatctcagatttccatcaaataggagagccttctctgaacctcaggacaagtcaggctgccctattccccacacacccagcactctgagctccacagcaaatgatacttccagggttaagtaatacaggttatgtttacttagttaactccatctctcctccatcactggaagtctcattcttatgtctttctggcttttatcgccatgtgctcagcagccagagcagaatccaaccaagaataggcaacagatgtgtgtgaaataaactaaaaaaaaaaaaaaaagactccatcctgtgcaagccgggtcttcattgggagagcttctcaattggaaatccttaagatgtcaatggttacccaaccccttgtcaggtgtgagccggcctggtttctatgccaattgctgtggctcataagaggcttattccaagattctcaagctcatcctccagttaagccctcttaacatcaggttcttgaaaaaggaggaaaggcctgcctactgagcgcatgggtgtaaaggaaaagaaaaaaaatggcatcactcacacagccctcattttccaccaccaccaccctggccccaggatggaagacttttgcttggggcttcatttgccttgggatgggtgtggcttacagaagattccttctggactatggcttagattctcagatcactataatttcacctctcatgaagaggcagagaaaaaatctcagttgagtctgttttggaatgtctttctaagtggaaaagaatttaagcttcatgaatgaggggccgttagccttaaccaccatcacttatgaaagtgcctttactgtgttcagtactcacacctttagcaaacttccctgcccatatgcacatggatatagcatggatgtgtcccctctaaatttcatgtcaaattgtaatccccattgttggaggtggggtctggtgggaagtggttggatcatggaggtggtttcatcatgaatggtttagcaccattcccttggtgctgttctcttgatagtgagtgagttcttgtgagatctgattgtttaaaagtgtgtggcaccttccctctctctttctcctgctgctgccagctgagaagcctgctgccctttcaccttccatcataattggaagattcctgaggcctcctcagcagcagatgcctgtgttatgcttcctgtacagcctgtagaactgtgagccaattaaacttcttttctttataaattatcccgtctcagatatttctttatagcaaggcaagaatggcctaatacacacactgctgtctataagagctgagacaatttattttcattcccaaagtcaaagggaaatggggcagtaatcactctgacttggtttctcctaatgtccactaaggaggaggaatctgactctggtagctctccattatatcatttttaggaagaagagtaagattaagaaatcaaaacattattctggctgggttgcgttgaatcgagccaagctgtatttgattcatgttatgaaccaaaaaaattctgatgatctgaatgcagattatgtcaatatcactacttctgtctttattgctaaaggggaagaagatttgcaaagcacagcctcaactcaaacagtgacatctgcttaatcttttccttctcaacccctgagtttaaatcttcaccaacatagctttgaaaaaaatgtcacttacagtgataaatcccttaacattgactttagaagaaagcttgtatagctttctctcttaaaataacttttaaaaataacttttctgcaattaaagataaagataagttcaaaaagatgtttatgaagcgaaagtagtgaaaatcatctactctgatctcattttctgtgactcaaaccagaaagtctaaattcaacatgccaagttaatcatttgttgttaggtcatggccttcagtaaaaaccttcaagccaccaagagagactgcagctgtcattcaagaatgagccacctcaagaggggtcataaaggtccacttgacctgtctcaaccagagaacaagtggggccaggaaaatctactctgtaaatctcagaagcctctaaacacagatgtgacagcatcttcgcaggccctgcaggtgaattcttggcctggctttagaaggaagtatgatgtaaatacacttgcaaaagacagcagtgtgagtctgccttgagcagaaagagatccggagggaggcacaggagggaggctgcttgattatggtgtttgtgggtgggctggccacggcacttccctgcctattctgcagttgctctgcttacgtgtcttaaagagtttatttccacaccatctagaggaagatttagaggacaaatgaaatcatgatatgggtgagataaggttatgagtgttgttcactaacaaatctattcaactttacaggcctgaggctgacagttcagctgcaaacactcactgggagtggatggcatgtggggaaaataaagagagatcagattgttactgtgtctgtgtagaaagaagtagacataggagactccattttgttctgtactaagaaaaattcttctgccttgagattctgttaatctatgaccttacccccaaccccgtgctctctgaaacatgtgctgtgtccactcagggttaaatggattaagggctgtgcaagatgtgctttgttaaacagatgcttgaaggcagcatgctccttaagagtcatcaccactccctaatctcaagtacccagggacacaaacactgcagaaggccgcagggacctctgcctaggaaagccaggtattgtctgaggtttctccccatgtgatagcctgaaatatggcctcacgggaagggaaagacctgaccatcccccagcccgacacccgtaaatggtctgtgctgaggaggattagtataagaggagggcatgccttttccgcagttgagacaagaggaaggcatttgtctcctgcctgtccctgggcaatggaatgtctccgtataaaacccaattgtatgttccatctactgagataggggaaaaccgccttagggctggaggtgggacaggcgggcagcaatactgctctgtaaggcattgagatatttatgtgtatgcatatctaaagcacagcacttaattctttaccttgtgtgtgctgcagagacctttgttcacctgtttatctgctgacctcctctccactattatcctatgaccctgacacatccccctctccgagaaacacccaagaatgatcaataaatactaaggaaactcagaggccggcgggatcctccgtatgctgaacgctggtcccctgggtccccttatttctttctctatactttgtctctgtgtctttttcttttccaagtctctcgttccacctaacaagaaacacccacaggtgtggaggggcaacccaccccttcaatggcacccattgctttaccagccatttcctcagcgagtgagcaaatacacacttcaggtgagacagtccttctctcactgtgtcagtgcctgtgtttttggccaaaggtaatggcttcaacctaaagtggctcagatagggggatttaattcctcacatacagaaacccgggatagttgattccagggtggctcaactctcatcagtctgtggctccatcacgtcattatggtcaagagccattttctgtaataagattgtttgagttcgggagccaggcctgcccctgagcttctttctgtctcagtttctccttttgtaaaatagggtaacaatggtatgttaacattgtaaggattaaatgagtaaatttgtgtaaataatgtagaaaagtgctggttctatagtaagtgctctgtgagtagtagctaataatgttaccaataaatgtcagcagcctgtcctactctgatatcctcagctctggcatttcaccagggtggaattcttcttcctgctctgacattccaaccatatagaattcttatgtgatcccttggatgaatacagtgtcatgtgtagatgcggcacaccccacagagaaggaacatccttccttttagttatgaaagcctttcctcaaagttccctagcttctcaaactatctgagatgaagaattagtttgtttttattttcaatccattatgaatcaatatttttgtaaactacaatacaaatcaacaaattaatgaaggaaaatatatacaaatccaagcttcaattatttattattattagatttagcaagcataaaattagtccattaaattactataaacatttttagatgcaaaaatggcaatctaagtccatgaagtggcaccatattttgtgtgactctgtttaagcagttatcactggagtgtacccaagggccaatgctgggtcacatggctaggctaacacaatctctggaagaagaagaagaccatcgtgactgggccagcaaagcctctgctccattggttccattcaacacacacacacacacacacacacaaacacacacagtgcctactgcgggcaaacagctggccaggcagcctgggaggtgtcccatgtggaatgctataaggtggcatgctataagacaataggcacaaaataatattttgacaagggtcccagaaacggctttgtacagcagggagggttcaagctgactcttggctaatggtgtgtgctgcttcaacacagtgacatgtgatgggagaagatactccaggcagcagaaacaatgagctgcagctgaggggaaagaaagttgttcaaggtacagggagtaaaaccaaaaggccgtcatgccaaaatacttattgtagagaaaaaaataatgtggcagaccatcttctcactacttagtgtgggatttggaatgggcaaaatagtggacctccaaagatgtccacaccctaatccctgaacctgtgactatgtcacctgccttgagaaaaggaagtctgcagatgtgatgagcgttctggaccctgaggtggggggtaccctgaattacccaggggggccttgtgtgtggacgtgggaggcagaagcgtgggccagagagaagccatgacaagaagaagaggcaagagcgatggtggcgtgtgaagggtgtgacaccccatgtggatttggagacacaggggacttatgtgcaagaaccaggaggaaatgctgggaggtaaagatgattgccaactgctggccacacggaaacactgccctcagcagtgccacttcaggggctgaattttgccaacacctgaatccgcaagaacatgtcttctcccctagagtttagtgaaaggacacagccctttgaaccttttgattttagcctggtgaggtccataccagacttttgagccacaaaactctaaaataatatatttgcattgtttgtaaggaacaacatttgtagtaatttgttgtcacaacaacatgaaactaatataaaattcatctgtaatttctcttttttaatgtggtgttctggacccgaccttcagaggttctggcttgtcaactggggctagttgttttaacaagctttccaagtgtttttgtctcattccctttcttagagttggagaacacagaggcccaagctctcatggggaatcagcatcagacaagaagctggcctccagctctccagatgcccaagcctgggctttccatcaagaagtgtaaagaagaagctctgtaaagtggagatggctttggagtaagattaaccaggtttaacacctaatcttgttacttattgctgtgtgcccttgaataacttacttagcctttctgggccccagcctcctcatcttatagtcagtgatataaacacctacctctcaggtttaaatgatctcattgtgcaaaccattcacgcagtacctaccacatagtaaatgctaaagctattattagatatgtcctgcattttaccaggcaagaaaataggagccacataacttcaaaatctctccatacattgctgatggctgcatctgtgtcctcccaacacagtgctcctcagtcaggaagaacaagtgaattcatttgttcattaaatatagtacaataatattgactccacccagaaatgttcattctattgtgtgccaggcacagtagatatgagaaagacctgtcactgccttccagaggagctcccagtccaggggaaagtgtttctcaaagtgtgagacattagaacccctgccctgggtaagataagagggaattgtaggtgactcacagacacagtataaagtcacatcactgcagagtgaaaagttactgcatgttcagtcaccttccatgcttctgattacatttaggaaaaggtctgagtttggtgccagcctgtctgtcgcctttctatcactggctgatctcagatatagagcaggtctcatgcctgctttgacaggcgacagagttctgctggaactgaagaatgttgtccagtcaccgctttggcaactgttattggtgtctcatctacagaggagatgctaagcttccttgtaaattttattgatttattttctatttctgattcgggtggttggtacatgggcaggtttgtggcatgggtgtattttgtgatgttgaggttcgggtttctaatggtaccattgcccaggtagtgaatacagtacctcgtaggcagtttttcagcccttacccttcctccttcctccccacgttcagagttcctagtatctattgtttccttctttgtgtcccaacttttacctcccaacttatgaatgagaacatgtggcattcgcttttctattcctgtgttaatttactcaggataatggcctccagctgtttctgtgttgctggaaaaaaaaaaaaaaaacacccataagttcattcttttctatggctgtgtagtactccatagtacatatgtaccacattttcttttatgatagaaagcatttatttatttatttatttatttatttatttatttatttatttattttactttaagttctgggatacatgtgctgaatctgcaggtttgttacataggtataaatgtgccatggtggtttgctgcacctatcaacccatcgtctaggttttaagccctgcatgcattagggatttgtcctaatgctctccatctccttgccccccacccctcaataggcccctgtatgtgatgtcccctccctgtgtccatgtgttctcattgtttaactctcacttatgagtgagaacatgtggtgtttgattttctgttcctgtgttagcttgctgagaatgatggtttccagcttcatccatgtccctgcaaaggacatgaactcattcttttttatggctgcataatattccatggtgtatatgtgccacattttcttcatccagtctatcattgatggacatttgggttggttccaagtctttgctattttaaatagagctgcaataatcatacgtgtatgtaccacattttctctatcctattcaccattgttgagcacctgggctgattctatgtctttgctattgtgaatagtgtccttgcaaatgttaaaggtgaccgaacttaaggaaaatcattaagacagtaatagtatgaataaaacacagacacaggaaaaatcatgaaagtaagacacacaagatgtttggacaaccctgtaatagtaaataaagacatgtaaacatttgcaaggttgagcaatgagagctaagtatatgctaggcaaagggagtgcagagatgggatgatcaaatttggctgagtagggaaacatcttgcaaagaaaggagatgcttgagtttcaataatacatacagatgagtgtttcagggagtggtgagtagggagggaggaactcctgtcagaaagaacagtgtgttcagaggcacagctgtgccacccagcactatgttcaggaaactgctgtgaactaaatgcttctcatagaagagttctactttgtgcacacagtcaccacacttgctgggaaaatcctatgtgtgtgtttgtgccacttggaatgcaacaattagtgtttaaaacctcatagaacatatgagtgtctttctgctctatggtttggtgagcaaaacttcacatcaagcatccattcctccttcgactggaaaactggatgtttttggcctcagaactttgcattagctttcttcattgtcttaaacctatttttaaactgaaatacacccataaactggccgagaaaagacaaagctgtatttgttaccgaatagcatttcggaaggaaaacttgtcagagtccttcatgatcactcacacagttttgttctttccaaagcaggggcgtaagaagccaggcccaggtgcatccttaaatgttaccctccactgcctaatgccccacatgccagcaggcgggattctccactacaacctgtcagaggatgccttgctcatctaaatagaatgccaggctccttcgtaattaagagcagcctctatatgtattgtcccactgaagaatattaaggacaaaatagttagctgtctgttgaaatccattatcagaatgttaactgaaaacattgcagttaaaaacttggatgatggataacaagagagaaagaagaaaagaaaaaacagaaggaggcttatgtatttgaacttcagagcaagccctaaagaccccaaggctatgatgagatcatttcctccagagatgttgtcccctctgcttggagctggcctctgttggttgagttaatggctttttgttttggtttggttttttttgttttgttttgttttgtttttgtttgtgtgtgtgtgtgtgtgtgtatgttttctttttgagacagggtcttgctttgtcacccaggctagagtgcagtagcgtgataatggctcactgcaggctcagcctcccaggctcaagcaatcctcccacttcaggccctcaaagtagctgggtctacaagcatgtgccattttttaagtttttgtagaaatggtgtctcactatgttgccctggccggtcttgaactcctggcctcaagcaatccttctgccttggcttaatcccaaagtgctgggattccaggcatgaaccaccacacccagccaggcttataagaaggtgaagattctacactgtgcccagatttaacaggaaaacccaatagttataagctcaagctctgaccacagaaaacctggagtctcaagcccaggccccagacaagcaacatcactcactgggtctcagtattttgtgtttaaagtgaggatgacaagcaatgagaaaatgcacacacaggatccagcacagggcccggcacagagcacctgctcgggagtggccgctgctgccctcagggacacttcagctgaaagaggtctaggagtgtgagtgggactctgccgaagctgcacagctggctccatgaaggctctgtgcagcggcaggaggcagaggaagacatgctttcactgggctttggcctcactgaagtgacaccaaaattaattaattaattaattaaaataaaacaaataaacccctaagttctttaagtacaagaggaagagttcagcaccctggtcctgatcagtcctggaagatgaggcttctgagggcgaggcggcaccagggcttccccttccaatgactcttccaaaccactcaactcactgaagactgagtcattgctgccattgtattgttgttgttgtgtcatcgttgttgttgcaaagctctgcactttactatcagaaaggactaatggaccaattagggagggttatgttgtaacattaccctcaatacacaaccacgaggtgccaaacatgtctaagagacacagggaggatggggtgcactaggctgcctctgttcccaaattctagccttgtggtgaagacagatgtgcaaacagccaactctagtgccagacagagtgtgatgagctctgtaactcaggactgcagagcagggagcaattcactgtttctgaaggaggaggcagcaatccagccaatccttagaaggtaagtaggatttcaataagtagaaaggggaggaaggcatgccacggtgaaagaacagatgggatgaaagcccagaaatggctgtatgggaagaagggaccacagccatcctgtgaattattaagagttatttttttaaaaagcatttggattccagattgcaaaggatcacagtaacagatgataggggctgaggagacagccactggcatatcggcatacgggtcacatgttcttctacctatcctgaagtcccttggtacaaatatagactcctgttcaagttgtctgttcacctgagtgccccccaggaggctgcaggctcaagagctgagactgtgactggttattcttcatctgggcacagaacagacaattcaaatagagctgcaaggcctacaagagtacatcattcactcccaggaaaacgaaagaagcctcactttcctcctccagaatcattcttggtgaacattgttctgctttagcattgacttcaaacacctgtaatcaccatgactaccaatgcttttctctccaagcggatcaaatctcactactctggtttggactattgcaggaacctcatgcttaccctgagcccccacgccccaaccctgcaaccacccctatgaaagcagagcgtgagacagctgcctacaggcatccataaaaaatggactatgatcccagggaataggaatggggcactaggaagggcaaggcagaaaaggatggtcagccaatatggtgccaccaatatgggcaactggttcagaactctgccatgatcctctgaggagccatttaggatacactgcaaatcattccagccagaggacaggaggagtattcatccattgtctccagcctcccgttggtcaagtgtggcccccatggggctgcaaattccctcacaatttcaggtcacatatgcaagctttcaggatggctctcacagacacttcacagtatcagagaagcactagaagaaggagaaaaagatctacatggcgcaggcaaaccagagtgctggctgtttacacctgcaagaggacaattgctgtagcaacagacggaataaaaggtagatggaaaaggcataaggtagagaagcctggcatagtgtccagtgtgcctgttaacttgtctcttccacctcagggtgagtctaacctggtgactacagcatgcgaggtccctccatagtgaggcctccactgggcccagcgtcttctactcctgtgactcccagccatgttccagccacaggtgacttccccagagtgaccgctgtgctctggtaaaagtgactctttgtgccctgagtgttctctgctctccctggaaaatctcctatgcagattttgatttatttcaaatagttcctcgaccgtgaggctcctctggtgctcacatagacacaccggcacctcttctattcttcagcaacactttggaggttgctctcaatcaaacagaaatagaaatttagttttattcatattttcattctcaatttttaattaattattatattgacatatatttcacatatcataaaattcatacttttgaagtgtacaattcagtggggttttctgtttgtttgtttgtttgtttttgagacaaggtctcactctgtcacccaggctggagtaaagctgtacagtctccgttcactgcaaccttcgtttccagaactgaagcgatcctccaacatcagcctcctgagtagctgggactaccaacgcacaccaccatgacctgctaattttttgtatgttttgtagagatggggtttcgccatgttgcccaggctgttctcaaactcctgagctcaaagtgatatgctcgcctcggtctcccaaagtgccgggactataggcatgagccaccgcacctggccacaattcagtgtattctaacatagtcacaaagttgtgcaaccaccacaactatttaattttacaagtttttcatcaccccagttagaaactttctagccattagcattccttcagccgttttttcctttccctaccccctgagaaacactaatctactttctgtatctatggatttgccttttatgaatgcaaaaggatgaataaaaacttgggaccccaattcactctgtcaaaagaaaaaaaaaaaaaacatgaagccgaaagctgagtcatgcaagaagctgcctctccttttgttcctaagtggagagctacagatgaaaggctacaaatctcaacaggtagcgactctgtgttcaccttatcttgtgtaaagagacgatttactgagtgtgagctgaatatctaattgacaattccccaactgcttcttttcccttgtaacatatggattgagtaatgtgaccatgccctctttctttctcctccagacacttttcccattaaatagtaaatccctcaaagtcatcttcggagaaaggcacagacctgtctctcgggtgtgcatccttaaccttagtaaaataaacttctgaattgattgagacctgcctcaggtactttttggtttacacagacatttctaacataccgtactatacaatgtgtgccatttgggtctgctggctttcacttggcatattttcaagatttatccatgtggtagcatgtatcagtacttcgtcttttttacttccatataatatttcattgtatgaatatgctacattctctctattgttcatcagttggatcttcgttttgttttcacttttcagctattgtgaatagtgctgctgtgtcttgagtgttaagagggggacatgtcaagggtttttctccagaaattcttaagcaaggaagaggagcacacaggagacacccttggcctatccacccatcctactcttctcgcctgggcttgcctttgttcctttctcctttgctctctgttttggtaaatgcttgtttactgctgagttagttgtctatgttgacttagttttaagtgcatagtaggtaaagctatttggcagttctgtaatgttactcacaatatagttaaccaaattttttttcttagtgtcatatttggtcactagcgactctcttaatggtctaacaaataaaagctccctgactttatttctaattcagggtaaatgaagaataaactaatatttgaatatgattatgaaaaagtccctttgggattgctacagtaaatatttattaaattgatgtttttatgagttattctcagctttaatagcactagggacacactagttgttggataaatactgattctctagcactagctgggtgtcctataatgcaattcaattctgacactctctgcatggagtcagcatctcatctcacacattaagagattttctcccacaggacaaaccccacttgaggcccaagactcaggctacctgcacttctgacggagcagctataaatggaggggctccatgacccccttctcaggtagaattatttgatggaagggctcacagaactcaggaaaacatttccaactcagaaacagctcaacggaagagacacttagggcagggtgtggagggtggagacacagcttccatatcctctctgggcacaccaccctcccagcactttggcatgttcaccaatctggaagctcatcctttggaggtttttagggaattgtattatgtaggcatgattgattatgtcattggccatcagtaatcgaactctaactgcagcccttctctcctcccagtagctcagcaggcagagctgaatgttcagtcaagcctaatcaaagcttagtctttctggggaccagctgctatccagacactcccaggaaatgactctcaaagagccacctcactagcactaatgcaggtatggttgaaaggggtttgttatgaataacaaaagttactcctattattcagtaaattctaagggttttaggagttctatgtcagaaagcagaaacaaagaatatatatatatatatatatatgctcatagagtaaatggataaaaggaggggaaaaagaaatagtgaaaagatggaagaaaggaaagagagagagaaggaaggagagagggagagaaggaaggagagagggagggagaaatggagagagagaggaagaaaggagagaaggaagagagagaaggaaaggagaaaaggaagagagagaggaagaaagagagaggaaggagagaaggaagagagagaggaagaaagagagagagaaggaaggagagagggagagaaggaaggggagagggagggagaacgggagagagagaaaaaaggagagaaggagagaagaaaggagagagagagaagaaagggagagggagagaaggaaggagagagggagagaagaaagggagggaaggaaagaagggggaaagagggaaagagaggaaggaagaggaggaaaaaagaggaagggagagaaggcaggagggagggaaggggaaaggagaggaaggaaggaaggaaagaaggaaggaagggagggaggggaaagaggggagggagggaggggaggaagggaagggaaggaaaaaaagaataagaactctaccactaatgctacctctgttgttggtggggctatattaaatctcccagattaaaaatgtttggccaacactggcttaaaagcttcccctaaaaataccatttcatcaactgagtgaccactgaggctcccaaataaacttgtacaaaaacagtccccattgattatttcagcccacatctcaaccatggctgcccttgggctcaaagctcacatagcaagaagggacttgcggttgacatgctggcaactcagcagctagagcagtttggaattggatgagcattggctgctcccaccctctcttttctctgaaatgcaaataagccctaggtaaggacatggtgagcaaagctgggggtaatccagcttattgtagggggcaccagcaggtctccttccatcatgcatcttaatctagataaggaagtgatgctggtttaggagaatgagttgcttctttgttggctgtggactcgcttctgaatatctgcaaaattgtcaggagaataaacaaatttctgcttgcctgtgtatatgacaagttccaacttcttcaccaattaaagtccgagccacctctaccccaccaccattcatcatttccacagtgggaaaattacacagtttgcacttttatatgtggtagcaattaaacatcttctggaagccaaaattcatagcaatgcagaatgatgatatagaaaacccccgtgcaaatgcctaatgtcattttttctccaaagggctataggtgttgcaaaaatccaggagagaggaaagtcttctagttataaagcagttgcccagtcgagttattcttaaactgcttttgtgccaagatatctcttgatggaaaatgtctccatgcttaatgtggaccatggacaacaacatgggcaagacagagtagagttatgtgtaatgtgtgacatagctgcagcctttctcccctattcctggaagtgaatcagaatacataaggatgaaagccatgttgctctagggaacaacttaaatctgttttcttttttttatttttatttttttagatggagtctcactctgtagcccaggctggagtgtagtggcacaatcatggctcaccgcaacctctgcctgctaggttcaaatgattttcctgcctcagcctctcaagtagctaagatcacaggaatgcaccaccacgcccagctattgtgtgtgtgtgtgtgtgtgtgtgtgtatgtgtgtgtttttagtagagacggggttttgtcatgttggccaggctggtcttgaactcctgacctcaggtgatctgcccacctcagcctcccagagtgccaggattacaggcatgagccaccatgcatgaccttaaatctgctttcatttacacaagaacaaaaaatcatttacaaacactactactttattattaataaatttcctggaggaatcctcactgcagtcctcacaattgttcacaatagcacctccttatcaagatgcaaaattgagaattgctagtctagaaaagtaaaccagttatcagctaaggtctccctgacctctaaaatttagaaaggataatctttataccgtgccctggggaaggccaatcctggcctcacattcccacaaacgcatggggaacttccatcttgtggccacctaagtcttcaacttcctgcttcctctctcctgcatcttgaggcagtttctgtagcttcacacacacatacacatacacgagagagagagagagagagatggcatctgtgtgtagcatattagcagagcaagtaagtggttaagagcaagttctagaatcagactgcatgggcttgaaggttgattctaccgtgttataactttgtgatcttgggtaggtcatattatctttccaagcctccattgcctcatagttaaaatggagataatagtaatactcaactcctatgctgctggaaggattaaatgagataatgtatgtaaagcattttgtacagtatttggcacttagtaagagctcagttaataacagctttatcaccgtcatcattaggactggaggtttgagaagacaaaggggttccactgcagtgaaacacacaaagcaaactctaaaactggtagttaaacactcctggtcttaatcacctggccatgtgctcagccatccttcctctctcatcctctttcttcttcccttttctactcttccccaatccatcctttgctcatttctgatgcctgccagtttgttttctgatttgaagccttgcttctcactaacaaatgtccccatggtcctaccttctcccgccagcaatttatcaaggtatttggttagacaaaagcaatagtctttcagttcctatgataatattttttgtactatactctagaagttaaaaccctaagagatgccagctccatgcaatttcctgccgctgcaaacaaactcactacggtttttaagaaaacaggtttttattatttggttgtggtttactattggcagtgatgtcaactgcaggagaggggagatgagtgtgatgtgtaagacaccacccactcattgcagaatgtggcccaatccccactccatcttgggcttcctttcactcttgcccacctgctgttttgcccatgatataatacccattctattccctggaagagataagaaacagactacccttatgtccttgaattttcctgacgtgcctggacagaggctcgggtcatgacagagagcccatcaacagacaggccacgctctgcccaacagagccctctgccacctgctgccgctgctgcttatggttgggacatggacagaagcatcccctggtgtttttaaaatatggccttggtgctgatctaccttttaggcagctgtgctttttctaccccaatggttgattgtgtcctggctttatttacttaaagccagatctcagctcttagttacttgccagtgaggacagaatttgccaagtgggtgagaaatgtgaagtttggagatccagaaatcaagtcttttggtcaaaaatctgtgcagataaatcagaatttaggaaaacagtaaaaaggggattgaccctaagaccctgggcaacccagcatggagaaaccttgcaccatcttagcttcttagttcaccttcttccccacatccaatcagtttgcaagctccatccaaccttcacacatctcctagatccttcctctcttctccctcaactgttctcccttccatcttggcgctgcagcagacacattttatgtatccgttcagacccttgccccctccctggtcctcggggctgcagcctgacaatgccctgcctcatgcctagaggtttccctgctgataaggcaggagatgcacagactctctatgtgcctgtccctgtgcagtctggatgtatgaggagttgctgctccatgggaccaattttcgtcaaggaaaaatcctccagaacataaactccttttctattttcccctcggatgcactgtcctggaagcagttagttatgtgcctcatgggagagaatgccctgatactaagctgtgtgcttgacacagggcagcagcagctcaatggcacatgcactcactgactctcctcccactgccgcaccctaccctcacatcattcattccttcaacaaacctggattaaatgtcagatgttgtcctgtgtcctggtacaatgcttgtcagtaatatagaacacctgtctctttcagagaaacccaggctaaggcacacgtgcatgcatcacctcacatctggaggactgcagaggtttcccaatcagttttcctaactctagcctctttccctgcttgcttttcctatgataaatattttctccttcccatctttattcctagttattcaaatgttcccatgtatatgcatttcaaggcccagtctggtggacatcttcccaatacttctttattttggaaattacccctcactccattcccactcatgggtatgggtacagtgacactaggagctaccacattcttccatgagccatctccatcatccccctccaccagagttccttggtgctgaaacagaccaatcagagttcttggctgagatattttacaagagaatttaataaaagattgattccctctttagtcacaaactaaaatgtgtgagcctccacagctatatttctcgctgtgtggggaggggatccaccgtgaggtagaatgatgcccacacaaaaagaagcagaggagagagatggagagagtcccagaagcattcaagtccctgataacagaggcccagccatctctctgtattttctatgcctcaaatgcttgaccttttccgcaattatatgagataccccagtattcctccaatactttcttactttttcctatgcaagttcaagttcaatgttagcttctctcacataatttattcattcaacaaacttctattaaatgtcaggcactgttctacatgttaaagtgtcatggggagcaaatcagataaagtcacttccttaatatcgtatgcaattttactgaggggaaacagctaataaaaaagaaaataatttagagcagtgataagcattagagaaaaaaatcaagtggggaatgaaggaagggatgttgtatttagcctcgtcgagggaggccttgctaagccagggataaatcacagataataaaaaaaagccagccatgcaaaggtaaaattggatgtaagagctataggaagggaaccgacttggagtgttcaggggcaggatggaagccagcacagccgggcacagggaggtgaggctagaaactcaggcagaggccaaagcaggtggctccttggaagacagagtggggagctgggtgctattcagcccagcatacccagaaaccttcccaatgccacctcccttttcatttgaacctgtcagcctgagtggaaagttcaccatagggagagctaagggaggctggagtccctctcggagatgacaaatttcgaaccacttactccagagccatgtcaggccctggggttttgctcccagtctcaccatggtaagatgggaggacttttcatattttatggtcttctttcctcttttaccgatacatgagaatttgatttttaaaactcctccagctacataatggccccaaaactgattgtaacaagcagaaacattcatgcccagtggctcttgcctggttccccatgtgtacccatttgaaaatgaatggacattatggaaacttgtaggcagacaggcggatgggagagcaggcagcaagcgctcaggtggagggcacgcatctgggctccaggccatctctgtctctcagtggccaagaggtcctgccttactcagaccagacagtaaagttattacaaacattgaagtctgtgtgccctttctggcaaagcttcagtgctagaatgatgatttcagcttctgtttacactgtattcagccatgtgctgtatgcactgcgtgcattatcctacatgatcccttggacaaccctacaggataggtgctcctgtgtccgtttcacagactaggacactaaggttcccataagtcctggcacctgcatgctcaccgaggctgtctctgccgctcatctcctgggcccatttcacagaggaagactctaaagctcctgtaagtcctggcacccgcctgctcgccaaggtaatctcctgctgctcatctcctgtgctcctgccataaaggtctgttctcttttcctcaaacactcaaagtctgttcctgcctcagggcctttgcactcgcttctgtctctgcctggatttcttcaccaggccagcttcttcattaagatttcagtccaagtgttcctgctcagaaaaaactttcccaggcatctgggtgaagtatatttcacctacctcagctgctctcttttccatttcctttttttgttttataaatagcctatatcactacctagtacttcctttttttttaaatttgtttgccttttaaattgactgaccatactactggtagaatatgagttttacgaaaagcagcaccaggtctgtctgctcagcagcgtgccccaggcatcttgcatggtgccaggcctttactggtgcatgatcctcatctgttgagcaatccataaatgagtgaatgaatgagaatttgtccagagtcacacagctgccagcacatgaagccctaaggctttgtggaacacggatttgtgacaaaagttgacagcaatttcaagctataattctgcatctcaatacctgattcatgcatccatttactcatctatgtattcagtggacatttactgcggttcccaccagatgcctgcactgtcctaggtgcctgggggtcatgggaaatgagacaaaatgtctgctttctgagaactggcactgtagggggatcagcactctgtgaaggtgtcatcatctaacttaacatcaggcagtgataacccctttgtagacagagtgagaggagttgcctatttgtgcactgaggccagagaaggcctgtccagaaagaaagcaaaagccatataagtatccagaagagaattatagaagatagaccataaagtgattttcttggagtcagttttggaatgtcaaagaataaaaaggacagtgtgggtggaactgaatcagaaagtgagaggggcaggagctgatgtcatcaaggcaggcaggagcctcgccgttcaggcagaggcgccgtgaggacaccgcagtctctctgaggacagacctacggagaggattctcagtggggacagacgtgattggattcacatgttagagagactactctggcttctatctggagaagaagttgaggaagagcaccatggaagctggtgtctcatctcctgagggcgagccctgaatcctgctgagactgcagccactgagctgaaggacagagggccctggggcacatggccatcctaactgctcaactttcttaggaagggaagcaagtcgcagaggaggagtttgtgcaagggcctacataaaattggggtgtgttttgttattaatataatccgcaccagctctcggtggtgttcggatttgttgctttagtgaacactaaactatgctccctccgagggaaacgtcattggaactcccgtcccaagtgtacgctgctgccccatgtcaccttcaccctcagtcctctctgccttcctaacagactgaaactccaggccacaattcagacagctttttatttattctttcaattatctatttacttttccttcttacatttactttttccaagattgcctgtggattctgagaacatcaggttctgaaatgtggccttcgtaactgttctcagtcctgattccaagcagagcctggcttggataaagatccctgtgtctcagcactgccaagcggggatgggtaagcagaaattcccaaatcgctcctatcagtggctgttttaaatctgcaaatgtccccaggcttgcagccagggagaccagcactatggctaagggcttatgagctccctcaggaatctgcctacctgccctttccttagtcctctgacaaatgtcctcagagccccacactttgaccaggatccccactgttcctgttaacaccctatgggggtggggtcacagaggtgctcatggaggggccgccagagctcgccaaggtcttcagcaccctcctgtctaactggccacttggtttagccaatccttcagttcaaataactagaataaccttttttgtcttttactaataatatgttttgctgactgcatccactgtctgttaggcagcaaagagtctttaaactgtggaaagacgggacacgtgacgtgcctctctctttgtcccttgggcagaaatgtgctgagagaacacttccacctacctcacaatgttgaatcctcaccactacctgtgagtcttttgttccttttgtgtgtgtgtgtgtgtgtgtgtgtgtgtgcgtgtgtgtgtgtgtgtgacagagtcttactctgctgcccaggctggagtgcagtggcaccatcttggctcactgcaacctctacctcccaagttcaagcagttctcctgcctcagcctcccgagtagctgggattacaggtgcccagcaccatgcctggctaatttttgtatttttagcagagatggggtttcatcatgttggtcagactggtctccaactcctgacctcaggtgatccgcccacctcaggctcccaaagtgctgggattacaggcgtgagccaccgtgcccagcctctgttcttattttaaaggcaaaaaactgaggctcagcaaggaggacagtctgttcagcaccacagagctagtcaacgttgtgatctgtgctagtttcctggggctgccttaataaagctccacaaactgattggcttaaaacaacagaagctcattgccttgcttttctgcatgctaaaagcccaaattcaacacgttaacagagctgtgctcctttcccaacctccaggaggattcctgtccttgcctcttctcacctctagtagctcagctgctctttggcttgtgatagttgtggcagtatcgcgccaaactctgcctccattttctctcagtgcctctgtctgaattgtctttttcttataaaaacaccagttctattggattaaggatccattctattccagaatgacctcatcttagctactcccatctgcaacaaccccagtcccagataatgtcacattctgaggtactggtagttagaattccaacagaccttttttggaaaacaaaattcaatctataacatgatcctagctacaactttggtgtcttttctccaatttcaaggcaaattcatctgctatggggaggaaatcttccactacaccagagtggccatcgagttagaaacagaagctataccaggcagtttcgtccttgtggctggcaggatgacacatgaccatttgcctgggaaagtccaggtttatgcctgtgacccagagtaaatactaatagtgccctttccatctcaaagttgatgaattttggacaattatttgacatcccacttagagtagacattttctggagcatttagtaagtatcaaacactgtgctaagacagtcacaagcattgtcttagacgataaccttataacataattgtccccacctcacaggtggaggaacccaggaactgaacagccacagccctgcagctggcaagaggcagagccagggtcttagctcaggtgggtttgattcccaaccctgtgaacttcatcacggtatcctagtgccccctgggtgcagatggagcgcagattcctattttattattcagaaacttcaacgagctgagctaagcctcttctcagccttcccttccccaagctgatattttacaaatcgcaaccataatcaaacaattgttcttttgaatgcattgcgctgattgttctgaaaggaaagtcataggctgatgtgttcctggatggagcagaatctatcatttttctactcaggaagaggctggctctgaaaacacagtggaacaaattcatcacccgggaatggcgctaactgcgtttccacagaggccctgcagctctggtggctgacactgggggcaggtctggatctctgcagtgaaattgtcccttcaggttgggtgccactttgatatttaagaaggaagattccacttcacacaagtgaccccttttgctaagaataactccattagctgctcttgaagcattgtggatcagcgattgtttagtagctgcgtggttttggtgactgttttgagttatacatgttgtgtcatctgatgaagaagattctcattttagtgaaagtttgaggagtgagtgccatgcctgcctctgtgagccctgtcctgaatgctagcaggcatcaccttggattgaaagctggaaagttaactctgatgcaggaatacaacaaaaaacattcagtgatgcaccttgtttaacaaaaccaaagattttgtccatcccgtcataaagacagcttctggtaaatttggagaaagagagggatatttcttatctctccctgagaaagtgcaggctacgtcttgcacctgtgccgccaccttctttaatgggccgagtggtgcaccctaaaatttgttgaagccctaacccctaatgtgactgtacttagagacagattttacagaagtaattaaggttaaattaaggtcataaaagtggaatcctaatgaccttagaaagcggatccctttgtctgcacgaacacacagtaaaaaggccgtgtgaggactctgaggaggccgctgcctgccatccagagtgagagcccttacaagactctaaccctgctggcaccaagatctgagacttccagtcttcagaattgtgagaaaataaatttctgtcacgtaagcctcccagcctgtggtattctgttatgacagtctgagctgactaacacagccttgatctccatagcccccaccctccacactgacatgcttctctcaccctgaggactgatccttttccttcattccccaaaagcaccacactttcataaaagcttggaagcatgctgggtgactgcagcacagagcttataacaaaatcatgaatgtgattgcagacataagtcttcctagagataaacctaattgacaacttccccctgtaggaaattttctacggcccttatatcagcatgctgctacacttttcccagcacccttcttacacctgtcattttccctgcacttcaaatgagaaggaaattccttctatagagtctggggccctgtgcccatgtaggggattttctcaagaagacctcgataatacagggagaacaagctattgaagaaaagcccaaaattcaagtaagggtgagaactgcaacctccctaccaaactggtgaggtcaagctagcacccctgatggcagacaccggggagctacaaggaaggaatgtgggcacaaagtaaaaactgtgctaaattgccaacgtttccagttttccagctgtggccatggtagccaaagccatcgtagcccagccaaatttactgagcatttctggcttctgtctccacaaagccagatgaaggagtaaaagggaagacttggaagcctaatatctctaagacactataaagacaagaaatggataacagtggtcaccaggaaggaggcaaaactggagatctggagaacagaaatggaataaagacttcatttttcactctagattctcaattttcacttagttttcagggctttttttttctaatcatagattagcaattaaacacttttaataaaatgattttaacagcactaaattacataagaaaaaaattcacagtgctatagaaaataaaccaatggccaatgaacatagaaaatgctatcaacatgactcatcattaaataaatgcaaattaaaggtagtaacaataacatccaaattactcctcagtgatttctcaaagaacttagaatggccgtttgaaccagcaatcccattgctggtcatatatccaaaagaaaagaagctgttgtaccaaaaagacacatgctcgtgtgttcatcacagcactattcacaatagcaaagacatggaatcaacctaagctcacatcagtggtaagctggataataattccatgtacaccatggaatactgggcagccataaaacagaattaaatcatgttctgtgcagcaacacggatgcagccagaggccattatcctaagcaaattaacgagtaaacagaaaaccaaataccacacgttctcacttataagtgagagctaaacactgggtactcacggacataaaaatgacaatagaaattggggaatacaaggttgggggaaagggttgagaaactccctattgggcactgtgctcgctacctgggtgatgggatccatcataccccaaaccttagcatcacgcagtatacctatgtaacaaatctgcacatgtacccgctgaatctaaaataaaggctgaaattatttttaaaaatattcctcactggccttataagtaggctatattctcagcttgccagaaagactattttaagagttgctttttaaaaattttcccaagagttaatctgtcaatctaaaacttcttttccacttgtaatttcatagcaaaaccaatacatatatatttcctgaaggtggggagaaaaggagaatgtgaattttctcttttaaaaagcaagtgtcaggggttattacatttcagaggttatcacacaaatccacaggctttgggtcaggctataactctgggaaacaggagttctctttttcactctatccactttaaaatataacttagaaaagtaatttatgtccttcttaaaattccactcatgtttactgcatgggactgtgagtagaagaggcctccaggcacctcacacaccacaacaagcaggaccatattactttggtgacagttcttatatatgaactattgcttagagcaatggggatgcaagaaggccgcaaagacttcaagtggaatgcatgcatctgtctatcaactttcaggccaagggggagtaaacaagagaaatagatccattaataagacaaaaatgtcaagaatagacagacatcaacagaaattacagtctctgaagaagcagtagcaatagaactgctcagatgacaagaaaaggatagtttctgtggataacactgttaaaagcatttccacatttatttccttctgtttgcaaccttaagatgtgcaaaatgttaaacagaatcaatgcctggagaataaagaacacttggaaaaggaactcagagagccgtatcttccaagctgggaggcctggcttccccacttgttcctcccagtaccgtggaggcagcgtgggaaatgctcatctgctgttattctgggcaagaggggagtgaggtcccttggaagcaaacacgagcttcttagttatctttctaccatcatcctttcagtaccagcacaatttttcctcctcttcttttcagatttgctggtatgacagtcagatttctcccatggatgttggccagaaaattccctggtctctcaatgccaggaaaagatgctgacctcacttctctcccaaacggagagcttggccaaagaggttaaatcacaacagccccaaatgattttttaagtgaaaatagattgtctaattttcccacccaaaagccttgcctgggtcacccctagagctaagcttatggggataattcatctgtaacatttttaattacatcgatcctgtcactaaaattgtgctaacattttttattacatggaaaaatacttgtcaacaatattagtagtgaaaaaacataaaaattatataaaatactctctcaactttttcacttatttttgcataagaactgtccgatctttttctgttctctgcatcactctatatatttctatttttcccaaataaatagaagttttctcataaaacgtgtaatttttaacaatctaatggaatttttagtataaaaagaaagaaatacattttaaagctgaatttaaacatgcagagaaaattgttgggaagcaaatttctaattagaataaacaaccactgcactaaaaacaaaattcctcaattgaactttctcttgtccctaaaattacatccttcagcatgaactaggggactaggcagaatcagaagcctggaaaaccaccactcctctcgccactcactctctctgtggccttgggtaataacctaatcaaatatcaatttcactgataagaatctgccaactgttctaataaaaaaaacaagcaaaacataggtgtggggggcttaaatttaattattgattctctgcacatgtagacctacacttccattaactttcgcttggacacctgaaagaaaaagcagaaccaaagtagtttcaaaaaggactctccccaaggcactttttaccagcccaccataaattccaccattaaagacttctgtctctgtgttgattatttctcctcttgtaaaagacgcacacataatgttgtggtaagtcaacggttttcttaatgggcctcatgcagtcttgtggggcaaggttgggggtaaactcaaagtaaaaaggatggaattgagtgattagacctcaaaggatggagctccttggagtgtaggaagggagatgggctatgtagagggtgctgatgcaaaacaggagatgggggatttggaaccaatcatcagagagaacaaaataataattttggataaactgtgaccttactattagagttgcctggtgatcagccagatttggtaaaataatttatatcagccaagatccccaaaagatatagagagtccactcagttggaattgaagaaatttaacagaggctacttacaaaggtgggggtgccagacaaggtccagtcagagaaagaaactacatgagtaactgaagcaggggaagctgatacaaagaattgttaactagaaagagtgactttcttcacaaagaagtaaaataagtctcaagggttctgaaagaaaatgcagaaagcagctgccacctgttgcctgagagaaagtgaacaaagaggcagcttaaagagggcctgtgatatagactgaattgtgtccctcaaaattcatatattgaagcttcaacccccaatgtgactgtatttgaagacaaggccattatggaggtaattaaggtaaattaagggcatgagagtggggccctgatctgatgggattagtgtccttgtaagaagatgcactggcactcatcctcccaccatgcacctgcactgagaaaaggccatgtgagcacagagagaaggcagccgtctgtgaccccaagggagagccctcactggatactcacactgcaggcattgagagcttggatttccagtttctagaaacatgagaaaataaatttcttttgttgaagccctgcagtctatgtcattttgtcagagcagccttagcagaataatccagcctctcgaagctgagattcagatatttttgaagagatcctggccaccaccacatgcagcctgcagcagagggagcgagctgaagctggtcataggacagcccaccaggtgacagaaaaacttttcagaaagtgctggtccaaactaagagcccagtggcttgtagaaaaacttgctagaggctgtgggtgggccaaagctggtccctagaagactgctgaagagaatgtcttcatgcctcccacattcccattcactgtgtcaaaaatatgcatggccatgaagtgttctttaatgctctctattaataaagtttcatactgaatgagctggcaaaggagaattgtttgcacgttttatgttcagtgctacagaactgcacgtttgggctgagaggcaataaattgataactgacagagggaaaaacaaggcacattgaggaaccgtgagactagcaacagttgtaagacctataactcaggtttcaagccaaggtagaagaaacaatgttactcaagtttggtaattaatagagccacagagctgcagtcataaagagataaagccctgacagatattatagtgtgcaaaatccctctctccctccactctctaatctgttcctgaattatcctgtctaaattcacctggaagcaagagggaaatggagctaggtgatgctacctataagcattttagcttgggctccccaaccatcagatcttgagacgagtctgtgagtacaaataattcaattgggagaagatgaagggaaggaacagaatagtgagatatagaagggaaggaagcaaataaaaggtacaatattaagcaaggaaaaattataagcaaataaaatttccaagccaactctgggagacagtgtagaccattgccccaagagggtttagttattatttattcatatttatttatttttgagatagggtatcactttgtcacccagcctggagtgaaatggtgtgatcaaagcttactgaaacctcaaactcctgggttctaggaattcttccacctcagctttctaaataactataactacaggtatgcaacaccataccctgctaatgtttgtacttgtttgtagagacaaggtctctctatgtttcccaggctggtcttgaactacttccctcaggcaatcctcctgcctcccaaagcattgggattacaggggtgagaaaccatacctagccaggttgatttatttatctatcaactttcattggtcattagttgaaaatctccccccaaaaagaaaccagtgaaatttctcaggagcaaaaaccaaggctaaaatataatggtataacatcttcaaactgtgagaaaaaaattattgttaacctggaattctatacccagctgaagtatgattcatatgtaaggacaaaatacttttcagattaaaacaaattaggagtttttatttatgtgcagggtctcaaagaatgaactgtcagactatttccttcaagtaataggaaataaaacctgaaagaaaaaaataagtgtaagggacaaatataaaaaaaaaattggcaaatagatggacaaatgtaaatgtgtgtgtatgttgtgtgtgtatgtgttgtgtgtgtgtgtgcatgtgtctaacacatcataggaaaactgccaaacattggaaacaaggagaaaaatattaaaagcaataaagagtgcattgcatataagagaatgtatataagatataatattgcatatgtgtactacatattgtttatatatacctacatacatatgtagatacatataaacacacatgtattatgtggtaataatgaaatattattagcttttaacaagttagctagaactgaaacactggtgaacaataacataaagtatggtgggaataggccagagataaagttttctaaattttttaaccatttaagttgaagatgaaaatacttattaattttagactccatcatcaagtatgcatgattaatgttctttaaagaagcaaatagaagttttatttatatttttaacatggaatagggcttgttattttattttaaatttaaaaagaagtacatatttatcatctgcaattgttgttttgaagtatgtatacattatgaaatggctaaatcaagctaattaacatatacattacctcacatactgatcattccttctgttgtgagagcacttaaaatctatttcttagcaattttcaagaatatagtaagtttttactaactaaaatcaccatgttgtatgatagatctctttgtcttattcctctggtctaactaaaattttgtatcctttgatcaacatctctccaacctactccccatacacgcctaccaactctagccccaaatcactattctattctctacttctatgagttcaactattttagattccacatataagttagatcatgtggtacctgtctttctgtgcctggcttattctctaaacgtagtgtagtcaaaatttatccatgtccaaaattttcttctttttaaggctctttttaaagaccaaatagtatttcagacacacgcctacacaacacacacacacacacacacacacacagaggaacttcaaaaaattagtgaaaaattaaattaaaggataaaaattaaaaatataaactttgtttctcaatgtaagctccatcaagttcaattaactttgtaattgatgacatcagccattaagtcaatttctaaagaactgaaggtcctggaaatttaatcatgtcagtgcagtctttttcacattattgacagaaaataagtgggttctctttacagatctttttaacattaagaagcaaacagaagtcagaaggagccaaatcagcactttcagatggatgtgtaatgattttccatcaaaactccccccacagtgttcttgccaatgagagaaatgagcaggagcattgttgtggtggagaaggattctggtgaagttttctttggcatttttctgctaaagctttggttaacttttttgaaacactctcataacaagcagatattattgctctttagtcctccagcaactcaacaagcaaaatgccttgaggataccaggaaactgttgccatgacccttgctcttggctgtctgattctgtttggactggaccacttccacctcttggtagccattgctttgattgtgctttgtcttcaggatcatactcattaagacatgcttcatctccgggtacaatactttgaaaaaatgcttcagaatttttatcccccttgtttatatgtttcattgaaaactctgctcttgtctgcagctgacctgggcacaacagttttagcacatatcaagtagaaagtttgctcaactcactgggtgtggtggctcacggcagtaattccactttgggagaccaaagtgggcaggtcacaaggtcaggagtttgagaccagcctggccaacatggtgaaatcctgtctctactaaaaatacaagagttagctgtgtgtggtggtgggtgcctgtaatcccagctactcgggaggctgaggcaggagaatcacatgaacccaagaggcagctcagctttaacttttcagagagaattgtgtaggctgaaccgaatgagatctctatggcactggctattgtttgtgttgttaattgttggttctcttcaattatggcataaacaatatgaattttttttattattgcttacgtacgcaaattgatgtggatagtctgctgttgcatactttatcttcaacatgtctcatcccttcttaaaacaaggtatccatttgaaaagtactaattttgggggggcattgtccccatgaactttttgtaaatcacctatggtttcatccttctttgacccaaacttaaccataaatgtaatttttttgcttcaattttaacagacttcatgttgctcagataggggctcttttcaaactcatgccttattcttctactaagtgttgttcacacatattaggtatgagtttattttgttgcaaaaaaatattttgaaatccatacatgattgttttttcatagtaatcattttccatgagcttattgaagagcccttgtgtgtctgtatgtatatcacattttctttatctattcatccactgatagacacttaggttgatttcacattttgactgttgtgaataatgctttgataaatatgagaatgcagatatgtcttcaacatactgatttcatcttctttgaatgtacacccattagtgagattgctgcatcataccgtggttctattttaacttttgagaaacctccacactgttttccataatggctgcaccaatttacatgctcaccaacagtgtgcaaggggtccctttcacacatccttgttaacacttgttactttccctctttttgataatagctcttctaacaggtagggggtgatatctcattgtgggtttaatttgcatttctctgatgattagtgacattgaacatttttaaatatacctcttggccaagtgtatgtcttcttttgagaaatgtctattcataggcttttctcatttttaatctggttatgttcttactattgaggtgtttcaggtcttatatattttggatattagccacttatcagttgtacggtttgtaaatatttttcttccattctgcaggttgtctcttcactatattgattttttattggttatgcagaagatttttagtgtgatttaatcaaatttgtctatgtttttattgttgtctgtgcttttttgttcatagccaaaataccattgcccaggccaatgtcaagaagctttttcctatgttttcttcaagtagttttacagtttcaggtcttacttttaagtctttaatctattttagttgatttttatgtatggtgtgaaataagagtttaatttcattcttctacatatagacatccagttttactaacatcatttatttaagagactggcctttctacattgtgtgtttctgacacctttgtcaaaatcaattgacagtaaatgtatggctttatttctcagctgtttattcagtctcactggtttatgtgtctgtttttaatgccattaccatgctatttagattactataggtatgtagtatattttgaaatcaggtaatgtgaagcctctggcttgttctttttgcccaagatttctttgttcatttggatcttttgtgatttcacatgaattttagaatggtcttttccatttgataaactcttaagcataattactaaaaattttcatggaacacatagtttcctcttgataaaaaaatagaataagtaaaattataatgacatttgtataccatttactgattctttttgttctcattgtttgtgtaaaccttgaaaagtaaggaattaaaaagaacgttttttctttaagcataatttatttaaatcatatttcggattttgctgatttggtaggtgctagctggggttaatggaggccacaaggaggtttccttaggtattttgcacttctttccagcaagacaaagaaagtaatatgactgaaaaaaaataaagataaatgtaacaaagtatctgaggaaagcaacccgaactttttatgttatctatttcccctaaatgaaatatgaagcactgttgaccttttaccctgaatgagccaaacttgtagcagaaacgggagcttggctgttgtctgtgcattaaaacctttctctcatttactatttccaggtaacaaactagaagagcgtcacagcttgtccagagagaaagctgagcccattgtcaaaatcagtactgcagcctttgctgactgtgactatttaacatctcaacacactgggggattaattacttgaacatttgggggaataacaacaacttgaaactcatattttaacctgtatgtcatgaatattaacaaagacaaatttataactgacttgactattttgtgtgtttttgcttttaagaaacagttggcttctgtaggaatgaacaataagaaataacaaaatttatttgttagtaaattttcctccagtgaatatgcatgcaccagactcactgcagcaaactcagtcgtctttgaaggataaaacacagaaaaccattttgttgtacaatgagatgagttatttgaacttaagacatgtttttttttcataagtttttatgaactaggtatcgcatgtcccataaggggtaatagatgtgttttctttgctctgctcagcacagatttgaaccatttctccaactccagggggctcagcctcatgctcaccttcaaaatcacaacaaggcctcctctacaccttttgcagctatggttaatacccagtgagttcagcctctgtgggctttctgcacctgcacatatgtacctccgtgttttgttatctcttggtggatactggaattgtaccctgggctgtacagcatcaagttgcatttaaatcagagagctggcatatctcactcaccacagcaggtctgcgtcagctgaatcttgcaaagcgtgtcttatcttccagagcataaatcagtaagggactgcaaagctgctatgggatcttctccctccctgtggaaaggaacacagtccaggaatgccctcaaatggacaaaccactctcttcatatcatttgttgtcttcattctatttctaattcaaagacagctgaaagccacagacaatagcagaatccctgcatggttggtggtcctggaagaagactggagagagaggtggagtggatctcaaggcaacaattagttagagctcctgctctttgattgcttgagaactcagaaaaggatgactaaggtcacttaggtgtagctaaaagggctttagagtcttaggaaaatgagaactctgaggagcctacacaccagtcactaagctggcactaagggtgtttgatcagggaagggtcactgcttgtttgagatggacaaccatggctctgacccattggctgacccctgaggagcctgtggggctccctagaaacaacccagaagtggcttcatccagaacaaagaggaagtttctaaaaggtgtagacatactcagagacaaagctggctcttgcctgagtgacaaagacattgagcttgcaggggtcccaccacaaggtaggtagaagcagagtccgatggttctgatcccacagaccattcattatccagtgttcactgcatttctactccacaaccagcaagctctagggaacatgttttttaaaaattaaagcagaccttgttgatgttatagtttttttggaggaaaaaaattgacttatgatatataatgtaatattatatataatatattatataattatatattataatttgtattagatattataaaatcaagagagtatgtaatcaaggcactaatacatggaacaggaagacagtatagagtgttggaagggggcagtcaatacgaatgaagcactgatcacttagagacgagaacagccctgagagcacaagcgtgacttcactgccttctgttccccagcacctgcctctggcctgtgccctagaaaggacaccaatatattgcagttaaacatattaaatgtggtgagatttggactgaatcttggagattaaatttcatacaagaaaaaacagcattattagaagtctatgaaaaaaatagaatgtttctctaaaaactgacaaagtgtaagagctaaaagagatcaggaatgtcccttttaacccacctgaccctcccctggactgttaattccttaccccattcagtgcccagcattcaataaatatctgcttattatttatgctctcttattccacaccggtaggttagcaaacatataatcaattcattttggataagagcctttctcaaattgattatatatttccttcttacacagagtaagctgaacatagtttaaacttttttgttggatgttgtccaacatgttcattgaacaaataaagaaactaaaacttggaaaggggaagagctcgccaatgtgtcacggcccttgagggttggcactgggttcaagctcagtgtcaatgttgttttcacactggagacaatctcttattttcaccagacgggcctttgtgaaacacatgaaggaaccctcagaagaccacttcagagacccccccatgaccacagtggagagagtcaagagaagttcattcaaggaggggctggtaaagtagcaggagctgggccatgcagggactcacaggccgcacctaggggtttacactcatcctaaccgaggcagaaaaccaccgcagagtgctgaggatggtgaaggcatgaggatgagttggaagaagtgagtttggctctgctctggagaatggctgaaagggtagtgggaacaaacggaggcagccaccgaggaggccatcgcaggtgcaggtgggatgcaaaggggagtgggcacaggcttggagaacagggatgcgtgggagtgcaaggcagtcaggtgggaaaaggcagtaaatacgagtggcttctccagaatgtaagctctttccccttctccaaatcatccagagcaaaggccagactcttggccacagtgtaaaaggcctctgggaatcacacccaggcttccactccacaccacaccatgccccaacacgcctccataaaacttgattctccttctacctggagctcttctacccactttctacctttgcccaaacaagctcagtttacctctcaggtctcaagatcgatgctaccacccctggaaagtcttcctcgatgctcccacccacccctttccatcggccacattcccatgacatgggttctttctctacctccactgaggcacagctctgcattataactgcctgatcacccacctgaccctcccctggactgtgaattcattgccccattcagtgcccagcattcaataaacatgtgcttattatttatgctgtcttattccacaccggtaggttagcaaacgtataatcaattctttttggataagagcctttctcaaattgattatacatttccttcctacacagagtaagctgaacatagtttaaccttgaacacaaggtcatcattatgaatgcagtcacaattaaagaatatcagacattagatagtctatcccatgcattttttagatgggtaaattgagacccagagaggtggagggaccatggtttgaggtggtaaatctatgatttgaatcttagcaccctgacttctagtctagccctgaagaaagctgcatccgaggagccatggtcaaattctctgggtatttaagatgcctagactctttgctccagcaccacagggctccaattgttgtattttattttagttattgtgcctgttttcatagctcttctgcctcctcccatgttatcaactcacttcttaatccttcagtctatccaaatcaaacaaactctatttgttttgttttgttttgtttttaagggacaagatctcattatgtcactcaggctgtagtgtagcggcacaattctggctcactgcaaccttgaactcctggcctcaagtgatctttcagcctcagtctcccgaggagctggaactacagacggaacgtaccatcaggcctagctaatttttcattttttatttttattttttttatagagacagggtttcaccatgttgcccaggctggtcttaaattcctggcctcaagtgatcctcccactttggccacctaaagtgatgagattacaggctttaaccactgcacctggtccctatctttattcgtatgtgtttgggaggcagataacagttttacctccccaaagcaccacagtgcttattattatctatgaacattgatgccttactacccagtctcctccactaaactaaaattccaggtccattttattgtcctctctgcacctggtgcctagcacagagcccagcatattcacatgtgctgaagaattatctagcttcttaagcatcatataaaataagcattattagtcatagaaaaagtataagctccaattcactggtttagcgatgcctattttcctaggtttcttttctgattcctagatgtgattgacagagcttagttctactaagcatgctgtatttagatgaagtaagaagtgactggcatttgtggagggactgtgtccttttttgcagtaattagaggttgttggcacatccagtctttgagactgttttccttacggctcccttttcgtagacagttgcagcatgagaagctgaaggaattttatgaagtagacattggagcctcccagtgattgccccttcggggttttgcagcaggcatatgctatttgcttggtccagagtgaagcgcctctacttttctggagaactgttccttcccagctacaataaggaggctcaaggcagagcgggtgtcattcatttgtttaatgtagttgctgtcttggtatccatttttagtcctaataaaagttatttgaaacccggttgtaccatgtgtcactttgggcctaattaaaacttcccctacccatggggttgtttgcagcataacccacttgttcctcatcccactgaccaaaaatctaacacacccacagctactgaccatgagaaaaccaatgatcaacaccagagtcatggaaatgagctccccttcacgcatgatttctttaaaggagccaacctgcagcttccctgcaggagagtctgaaaaactcccaggaatttaacaaaggcagagtctcacaggcctcaggcctctctcttccctgctgtctgagcttcctgcctcctccagacctcctgctgtcctctcagcaacacctcgaacctctctgtgacttataagtaatgaattccttctgtttcaggcattttggtttcacctcctcagtgtgtttcatctgacagacacacccaggcccaacatccccctggtcagagtgctcctacagatggctctcttggcttatggtcactcttaagagggtaagaccctcttaccctcttaagagttatgtgatttgtatcattatggtttcctgtttgtaaaaaaaaaaaaaaaaaaacaggaaaccataatgatacaaatcgcaacagcaggatcacactgcctggctaaaggcaattgctttgcagtgaacacgtaacttaagccatgtcaattaaggtttttccctggaacttttggaaataaagccatggaaagagattcttgcaaggtaagggtggcaaccatgttttcctccatgaaagcaaaaatgaacaacttaaaacaacgaagttgagatgcagagaggagtagagatgagagggcatggtgactgagctcaagtccctaggggtccagcaccaccattccccgccgtggaatctgactgcaacacctctaagtcacaggaatgccactctgctgcacctagcatctgcaaccagaggattcctcagtgcagaaaacacaggagatttagagaagcccatggaggacagacctctgatatataattagagaaaagccaatggtttagagctcattcctcatctgggaaatctgttgccatgaaccaaaaccaaaatgagctttagggagtgattttatgggttaaatcccagagtctgaaacaaggaagcgagcagccccctcccctgctgccctcttcaaagcctcctgtgtcacagctctcaggctaagcctctgtgctgaaacattacaccatttcagagagtaaatctggctctagagcagggtctcagcccagcataggaagtgtttcctaaaaagcacagcttccctctaggggctactttataaggagataagcctcctgcagtgtatggggagtactccaggagagttgtcgggatatgggggaatcacagaggaaatgctaaacaaattgtttgtgatttgctttgctagttctgctcacttccaagagtctgtgattcttggcttcagtcacaagggcaagtcagttgggcaaattcaaaacaaatgtcaaaaccattatctggtgagggagttggtgatttctcttctgctcttaatgaaacctccaccctgttttcctgaaggtacagttcgtcccatccttccctccccttccctggctggaagaggcagcctccctcctcccattgcccaggaggtactctgccaatatcagcaacccccactgtcatttctgtgcaaatcccctatcatcccagtaatctggccagccctacacatcagtcagccttgtatagctcgggttcaccagggagcaggctctagagctctggatgaacacctgcctatgtcttggctctgaaacttgcacctgctctataagtagatgaccccgcccctgcagacatgggtctgtgtgcggctgacatgcacaacctggaaagccatggaggccctgccttagtcactaaggctgagggcaagggttcctataatcccaggacaaaccttgtaggtatccagtgggataacctgtaagtatttcagcttctcccatctgcagctattaacccttgaagtgcaacagtaaatggaggaaatcggccaggaaagaggagaccacagtgtggattcttgaaggccttcacgtggggagggatacaaggctctaataacatgcatcagatgtggatactgatcattcacactacagattatttccatcagtacttcttttttgatgccagaaattacatttggagcctggctgagactctgatgtgccagtctttataaatgttgatgttcagtcagaatggctattattaaaaagtcaaaaaaacaacagatgctggtgaagctgcagagaaaagggaacacttatataccattgtggggacgtaaattagttcagtcactgtggaaagcagtttggagattcctcgaagaagtaaaaatggaacaaccattggacccagcaatcccattactgggtatctacccgaaggaaactaaattattctaccgaaaagacacatacactcatatgttcattgcagcacaattcacaataacaaagacatggaatcaagttgggtgtccaccagtgttgaatgggataaagaaaatgtggtaaaagatgaaaatgtggtatcctctgtgaccataaaataaaacggtactaatttaaaagtcaatagactaatttagaagtcagtagatgccatgagtccccattcatccctgtgctgaaaattatgacttcattcctctctcttgcattctgcattctacttcttctttttcttcttttgtttttgagaggatcagtgtaatctttattaaatttatttttaattattatgggtacataatagtagcatatgtttataaagtacatgtgatgttttgatacaggcacacattgtgtaatgatcaacttagagcaatcggagcaaacaccacctcaagcctttatcatttctttgtgttaggaacattccaattccactgttctagttattttaaaatatgcaataaattattgctaactatagtcaccctgttgtgctactgaatattgaatcttgtacattctctttaactgtatttttgaatccattaactttccctttttttgttgttttttgtttgtttgtttgtttgtttttgagacagtctcactctgtcgcccaggctggagtgcagtgtcacgatcttggctcactgcaaactctgcctcccaggttcaagcgattctcctacctcatcctcctgggtagctgagattacaggtgttcaccaccacgcccagctaatttttactatttttagtaaagacatggtttcaccatgttggtcaggctggtctcaaatgatcctcccacctcatctcccaaagtgctgtgattacatgcatgagtcatcgcgcccggcctaaccttcccctctttatccttcccccacttcccagcctctggcaaccatcatttcactctctgtcttcataagtgcaatttttttttcagctccttcaaatggtgagaacctatgatattttcctttctgtttctggcttattttatttaacagaatatcccccaattccatctatgttgttgcaaatgacagagtttcattctctcttggctggataatattccactgtttctatgccccgcattcccttcatccattcaactgcagacgtgctccacttgctctgagtcatcctccctgtgtcacctcccgtgtgcttcagaatagatgttgttggctccacgtcctcattctacccacgtcagctgtccctgctgacagcaagtttctgccggggtgccccacatgtctaagcccctgtgttggctcggggtctcagggtttaatgacatgtgcttaggttgccaatggccagtggaagcagagcccagacacgcctcaggatcttctccagtgcctgcatccacattgccagagacagctcaccccagccaccatgaccagtgcagagctccccacgcctcagcatctagcatccaggcccaactgctccaaccaggccaagtatgggtctcctccctgacacctacttttcatggcagaacacctacttttcacgggaggaactctcgtctctctctctcatcaggctgtgataacgcctcatggccccagaagtccaaagtctggttgttgtagcatggatatgggtttgctctaaatctctggttaaaatgtgacctccaatgttggaggtggggcctggtgggaggtgtttgagtcatgggggtggatctttcatgagtggcttggtgccctccctaaagtaatgagtgagttctcactctatgtgttcatgaaacagctgatttcttagaggagcctggcacctcctccagctctcttgctgcctctctcaccatgtgacatgcctgttcctcctccaccttctgccatgagtaaaagcttcctgcaccctcaccagaagctgagcagatgctggtgccatgattattgtacagtttgcagaaccatgagccaaataaacctcctttctttataaattacccagtctcaagtatttgtttagcaacacaaaatacactaatacactgggtaacttcatagtcagcagatgaccacccttttgtctcattccctctcttcccaatcattccagatacttttacatctgtccttcaaaccatggctggagtactgtgggactcaaaatcgataaataattaatagattctaaattctgtgtgaaaagagagctaataactagcataatcttaggaacatgctagaaatggccctagcagagatggggcagagggcagtatgtttttgaagggagtgaaggggaagacagccagagcagtgcatgagggaacccccaggacaggggtcaggacaatgggagagaggggagccatgaagggcacactttgctttctccactcctgagggctatctctgaattttgctctccatttagctgagagtgtgaaattgagaattcataaaatcacttttattcctttaaatggcccttatgaaaagctttcaagagtcatctctaaatgtacttttcagttgcattttcatgaacaatattcaaggtcagaatgagcaaatgtctagttagccattggagaaaggaccagtagcacacagatatttccagcattctagagacatgtaaagtacccttggaagagccggcatttaacttgttgaacattaaatgccattaatgctcagctgcacagaaatttccatttctgaatattcttctccaaatttctcccttgaaccatattattttagttcagcctcaattataccatcaaaattccaccattcataaatgtattaccattctgaaaatgtacttgatggcatctttataccatgctgtggaaaaatgtgtagcaataaaaaaagataaatcacaaggttttttttttttttggagccaattagccaaacaaaacttaaatataaatcaagcttggtagaaaccacaggtcatgctcaagtttatgaattcgttatagagcagcactgccttgaattcaaccttgcctagctttggtcttgaccacagcatcacaagagtggtaataatatcagtaggtttactgacatgcacaagcatattcccaggttgcagtgcaggacccgaggtagagccgagactccccaaaaaggcagttcagaggtaggcacgcccagtgggtctgcatcagagcccctgcgtctggttcagggactgagatgagtttctcggcttccctgagatgtaatatttttacctatcaaatcaaaattactgtaacttctgcctcactgattgtttttgttagaattcaataaagaaatgtctcaaagcagtcacacggtacctgatacggtgaacactccatatgttgttctttattatatatacacacactaagttatatacataaatacattaaaaattaatttatatttttcataactataatttatatttattcataactataatcacataattcaattatatgtaatagataattttatagttatataatgtgtgtgtgtgtgtgtgtgtgtgtgtgtttgtttaaaatgtccttggaaaacagaagcaggtagagatgggaggagacaggcattgttcttcgggctgggctggcatccagggggcctctctggccagccaattgcacatcttctgagcaagggagagggaacatggaccagagaacagccattggaagagaaaagcagaaaagaaattattttcagttttcccgaatttctttccaaagtcatttcaaagactaggagtgaaggctgaggctgggtctgggacccccaaacttcccagccactctgtgacaaaggcaggttcgagacgattattccctctgcacaaacaaggaaacttagggtgaaggaggagctcaggaggagttagcagggaaacctggcacagaccaaggccctctaatgcccacagtgtgccgcacgattggccctcaccccacacccctgaggctccgttttcaccccatgtcctatagctagccctgctggcttccctgtggtttccatactccaggtaagctcaggcagtggggcttttgctcctgttgtcccctctgtggaaactctcttttttcagagagccccacagcttactccctcatgtgggttggttctgtgtcccacccagatctcattttgaattgtaatcctcacatgttgagggagggacctggtagaaggtgattggatcatgggggtcatttcccccatgctgttcttgtgatagtgagggagttctaacaagatctgatggtttaaaagtgtttggcagttccccgcttactctttctctcttgccaccatgtgaggaaggtatttgcttccccttcaccttcctccatgattgtaagtttcctgaggcctccttagccatgtagaacagtgagtcaattagactttttctcttcattaattactgtctcaggtagttccttataacagtgtgaaaacagactaatgcactccccaccttcatccaggtgtttgcttcaatgtaactctatgtgagaggccttcctggcccatatcatctgaatagcacccccattattttctatctccaatactgttttctttttctctcttttcaccacccaactcataataaggtgattgtctacaccacccatccacaccaactgtaatgtaagttctaggagggaaggaacattattttattctttgctatattcggtgcatggaacagtgcctggcattaataaaaatattttgggtgtaaaaactctaggcttagaagcctgatcctaaaatctgttctgcctaagttctgtgtactctatcagagacctgaacattggtgggtacctggctgctatggccagccaaccatatgttttataccagtgaatgtggtgtctggaaaatgggttgagctcttttctctttttcatttatcttgggcattgcaagactttgatctactggattcaacaaaagaacactttgaccctatgtttataagtaaaaatgctttggtcaaaattattccaactctggtgaaatttaatttgaaagcattttccaaaaccaattccacaagccattttgatttgttagtgctcagttaatgttatcaggtatttggctgaaaccacctatataacagttaacataggaccacagagtaaaagttgcaggcatagttaaaagttaaccagccattgtttctaagctcatcccataattgcttactgcccagaagccatgtagccagtggtcacaagggctgtaacttctcctaattgctcttatagatagcatcattgttgaaaacaaatgcttagtgctacaaagaagaaccagcactgagacaaaggatctctcagcaaggcaaattttcttctgcagaagggtgcttctcccatgtggagcaatggaaagagcacaaagaacaaaacagagcaggggtttttattatctcttaacgctgcttgtcactgttactgtgtctgcctccattggctagagttgtaccacacagtctaagctgaacctggttggttaacttgaaaaatgcagaaatgtagttacatcagcagtgggaagacaagaagatcagtttcagtgggagaagtcattgcattgggaggggtaattcacagagtgggtagcagatgtggaatgtgggctctatagataaggactggcaggaatgttgtttaccagggctgggggaatatagagagtaaggaagtctggccttgaaatcagggaacaaaggacaagaaaacttaaacaagctaaacctttgaagaagaatttcttactgtagtcaatgatcattattgtaaaacctatgactgttcttcaaaatatttttcagacttgtcaaccactgtaccaaatggcactgactggaccaagggcccattccaagaaattgattcaacaggctgacacccctgcccaacccagaaactggattagtgcaagacaatcaatactctacacccctatgagttcatccctagccaatcagcagctctaattccctagacccctgcccaccaaactaccttaataatcccagcctctaagttcttaggaaggtagatttgagagatttctcctgtcctccttgcttggctctcttgcaattattaaactctttccctgctgtaacacctactgtctcagtgtattgtttttctctgggcagtgggcaagaagaatccaccaggctgtacattgtaaccaccctttcccttgccccttaggcctcaggacagcagtgttcctcactgttgctagctcaggggttctatgccatcttttgttaattttatttaagcctactcacacttttgtaaatagttctttccttaaaccctcttcaattacctagtttgcatgtgttaaccacttcttgcctgctggtcccagacttatatagttcatttatttataatcagtgaagatactttcctgcttccacataaaaccctaggcagtgacttttctgttcattcttaggggaaaacaaaaaacaaaaaaactatgggcagtttgagttaaaaactaagtcaaatttggagggaggagccaagatggccaaagaggaacagctccggtctacaggtcccagcgtgagtgaggcagaagatgggtgatttctgcatttccatctgagggaccgggttcatctcactacggagtgccagacagtgggtgcaggtcagtgggtgcatgcaccgtgcgcaagccaaagcagggtgagggattgcctcacttgggaagcgcaaggggtcagggagttcgctctcctagtcaaagaaagtggtgacagagggcacctggaaaatcgggtcactcccacctgaatactgagcttttccgaccggcttaaaaaacggcacaccaggagattatatcctgcacctggctcagagggtcctatgcccacggagtctcgctgattgctagcacagcagtctgagatcaaactgcaaggcggcagtgaggctgggggaagggcgcctgccatttcccaggcttgattaggtaaacaaagcagccgagaatctccaactgggtggagcccaccacagctcaaggaggcctgcctgcctctgtaggctccacctcgggggcagggcacagagaaacaaaaagacagcagtaacctctgcagacttaaatgtccctgtctgacagctgtgaagagagcagtgattctcccagcacacagctggagatctgagaacgggcagactgcctcctcaagtgggtccgtgacccctgacccccgagcagcctaactgggaggcaccccccagcagaggcagactgacacctcacacagccaggtactccaacagacctgcagctgaggtcctgtctgttagaaggaaaactaacaaacagaaaggacatccacaccaaaaacccatctgtacatcaccatcatcaaggaccgaaagttgataaaaccaaaaagatggggaaaaaacagcagaaaaactggaaactctaaaaagcagagagcctctcctcctccaaagcaacgcagttcctcaccagcaacggaacaaagctggacggagaatgactttgacgagctgagagaagaaggcttcagatgatcaaattactctgagctacgggaggaaattcaaaccaaaggcaaagaagttgataactttgaaaaaaatttagaagaatatacaactagaataactaatacagagaagtgcttcaaggagttgatggagctgaaaaccaaggctcgagaactaagtgaagaatgcagaagcctcaggagccgatgcaatcaactggaagaaaaggtatcagcgatggaagatgaaatgaatgaaatgaagcaagaagggaagtttagagaaaaaagaataaaaagaaacaagcaaagcctccaagaaatatgggactatgtgaaaagaccaaatctacatctgattggtgtacctgaaagtgacggggagaatggaaccaagttggaaaacactctgcaggatattatccaggagaacttccccaatctagcaaggcaagccaacattcagattcaggaaatacagagaatgccacaaagatactcctggagaagagcaactccaaggcacataattgtcagattcaccaaattgcagatgaaggaaaaaatgttaagggcagccagagagaaaggttgggttaccctcaaagggaagtccatcagactaacagcagatctctcagcagaaactctacaagccagaagagagtgggggccaatattcaacattcttaaagaaaagaattttcaacccaggatttcatatccagccaaactaagcttcataagtgaaggagaaataaaatactttacagacaagcaaatgctgagagattttgtcaccaccaggcctgccttaaaagagctcctgaaggaagtgctaaacacagaaaggaacaaccggtaccagccactgcaaaatcatgccaaaatgtaaagaccatcgagactaggaagaaactgcatcaactaacgagcaaaataaccagctaacatcataatgacaggatcaaattcacacataaaaatattaactttaaatgtaaatggactaaatactccaattaaaagacacagactggcaaattagataaagagtcaagacccatcagtgtgctgtattcaggaaacccatctcatgtgcagagacacacataggctcaaaataaagggatggaggaagatctaccaagcaagtggaaaacaaaaaaaggcaggggttgcaatcctagtctctgataaagcagactttaagccaacaaagatcaaaagagacaaagaaggccattacttaatagtaaagggatcaattcaaaaagaagagctaactatcctaaatatatatgcacccaatacaggagcacctggattcataaagcaagtcctgagtgacctacaaagagacttagactcccacacattaataatgggagacttcaaggagaactacaaccactgtcaacattagacagatcaacaagacagaaagacaacaaggatacccaggaattgaactcagctctgcaccaagcggacctaatagacatctacagaactctccaccccaaatcaacagaatatacatttttttcagcaccacaccacacctattccaaaattgaccacatagttggaagtaaagctctcctcagcaaatgtaaaagaacagaagttataacaaactatctctcagaccacagtgcaatcaaactagaactcaggattaagaatctcactcaaaaccactcaactacatggaaactgaacaacctgctcctgaatgactactgggtacataatgaaatgaaggcagaaataaagatgttctttgaaaccaacgagaacaaagacacaacataccagaatctctgggacgcattcaaagcagaatgtagagggaaatttatagcactaaatgcccacaagagaaagcaggaaagatccaaaattgacaacctaacatcacaattaaaagaactagaaaagcaagagcaaacacattcaaaagctagcagaaggcaagaaataactaaaatcagagcagaactgcaggaaatagggacacaaaaaacccttcaaaaaattaacgaatccaggagctggttttttgaaaggatcagcaaaattgatagaccactagcaagtctaataaagaaaaaaagagagaagaatcaaatagatgcaataaaaaatgataaaggggatatcaccaccgatcccacagaaatacaaactaccatcagagaatactacaaacacctctacgcaaataaactggaaaatctagaagaaatggataaattcctcaacacatacactctcccaagactaaaccaggaagaagttgaatctctgaatagaccaataacaggagctgaaattgtggcaataatcagtagcttaccaactaaaaagggtccaggaccagatggattcacagctgaattctaccagaggtacaaggaggaactggtaccattccttctgaaactatttcaatcaataggaaaagagggaatcctccctaactcattttatgaggccagcatcatcctgataccaaagccgggcagagacacaaccaaaaaatagaattttagaccaatatccttgatgaacattgatgcaaaaatcctcaataaaatactggcaaactgaatccagcagcacatcaaaaagcttatccaccatgatcaagtgggcttcatccctgggatgcaaggctggttcaatatacacaattcaataaatgtaatccagcatataaacagaaccaaagacaaaaaccacatgattatctcaatagatgcagaaaaggcctttgacaaaattcaacaacccttcatgctaaaaactctcaataaattaggcattgatgggacgtatctcaaaataataagagctatctatgataaacccacagccaatatcatactgaatgggcaaaaactggaagcattccctttgaaaactggcacaagacagggatgccctctctcaccactcctattcaacatagtgttggaagttctggccagggcaattaggcaggacaaggaaataaaaggtattcaattaggaaaagaagaagtcaaattgtccttgtttgcagacgacatgattgtgtatctagaaaaccccattgtctcagcccaaaatctccttaagctgataagcaacttcagcaaagtctcaggatacaaaatcaatgtacaaaaatcacaagcattcttttacaccaacaacagacaaacagaaagccaaatcatgagtgaacccccattcacaatcgcttcaaagagaataaaatacctaggaatccaacttacaagggatgtgaaagacctcttcaaggagaactacaaaccagtgctcaaggtaataaaagaggatacaaacaaatggaagaacattccatgctcatgggtaggaagaatcaatatcgtgaaaatggccatactgcccaaggtaatttacagattcaatgccatccccatcaagctaccaatgactttcttcacagaattggaaaaaactactttaaagttcatatggaaccaaaaaagagcacacatcgccaagtcaatcctaagccaaaagagcaaagctggaggcatcaggctacctgacttcaaactatactacaaggctatagtaaccaaaacagcatgctactggtagcaaaatagagatatagatcaatggaacagaagagagccctcagaaataatgccgtatatctacaactatctgatctttgacaaacctgagaaaaacaagcaatggggaaaggatttcctatttaataaatggtgctgggaaaactggctagccatatgtagaaagctgaaactggatccctttcttacaccttatacaaaaataaattcaagatggattaaagacttaaacgttagacctaaaaccataaaaccccagaagaaaacctaccattcaggcattaccattcaggacataagcatgggcaaggacttcatgtctaaaacaccaaaagcaatggcaacaaaagccaaaattgacaaataagatctaattaaactaaagagcttctgcacagcacaagaaactaccatcagagtgaacaggcaacctacaaaatgggagaaaattttcgcaacctactcatctgacaaagggctaatatccagaatctacaatgaactcaaacaaatttacaagaaaaaaacaaacaaccccatcaaaaagtgggtgaaggatatgaacagacacttctcaaaagaagacatttatgcagccaaaaaacacatgaaaaaatgctcaccatcactggccatcagagaaatacaaatcaaaaccacaatgagataccatctcacaccagttagaatggcgatcattaaaaagtcaggaaacaagaggtgctggagaggatgtggacaaacaggaacacttttacactgttggtgggatggtaaactagttcaaccattgtggaagtcagtgtggcaattcctcagggatctagaactagaaataccatttgacccagccatcccattactgggtatatacccaaaggactatagatcatgctgctataaagacacatgcacacgtatgtttattgcggcattattcacaatagtaaagacttggaaccaacccaaatgtccaacaatgatagactgaattaagaaaatgtggcacatatacaccatggaatactatgcagccataaaaaatgatgagttcatgtcctttgtagggacatggatgaaattggaaatcatcattctcagtaaactatcgtaagaccaaaaaaccaaacaccgcatattctcaatcataggtgggaattgaacaatgagaacacatggacacacgaaggggaacatcacactctggggactgttgtggggcagggatgggggagggatatcattgggagatatacctaatgctagatgactagttagtgggtgcagtgcaccagcatggcacatgtatacatatgtaactaacctgcacattgtgcacatgtaccctaaaacttaaagtataataaaaataaataaataaataaataaataaataactaagtcaaatttcattaggtaaaactgcccagtcccaactaataatcaaagctccaaagttacttagcactaaatattttttcccttccatagcaaagcctaaaattgcatactagctacttgcaaggatgggtcagaggaagtcaaaaaaggtgaagaatatgttctttctccatttcattatctagtatttcttctttctctgcaaattgcttattaaattttcaagctctacctgagtcaaagaaggagatgagaagaaaagagataatgataaaaaaaaaaaagtgtgaaacaaaaataacattctaagccccccttactgactgtacagaccctctcttggccaaggggattccaaaaaagcctgaaaaactgagaaaggccttgttgagaagggaagtcagacatgcctcattgtaccacctctctttggagtttagttccaactgaccagcattaacattaaaacagaaatcttaacactgacaaaacagactctttgtagcaataggacagcaagtttcaactggctctggtatagcatcacatgacagataacaggtcctaaaagaaatcaaagcattttatcctgaaacatatgtatttgatgtattttgaaattgccctgcaaagttgtcacttgtggaaaaatttgcattctgtagagaatctccttccctttatgtgtgttttcctgatccaggaggagatgcaactaagagtttgacaccttttaaggttcattaaaaaaagaaacacttaccatctattttctctgaagtctgctagttagaggctttatctacataacaagagccttgcttttatcttccccttaactcaagcatttattttagctaacttcaactctctaggcaaagtttaaatttttcaaccaattgtcaattagaaaatatttgaatccacctgtaaaccactccccaccacaccctgctagaagatgtcccaccttcctggttgaaccaatgtatatatcacatggattgattcatgtctttgcttgtaacttctgtctccctgtaacgtagtaaaccaaggtataacccaatcaccttggccacatgttctcagaacagcttgatgctgtatcctgggcaatggtcacttatatttggctcagtaaaaacctcctcaaatattttatagagtttgtcttttctcatcaacagtggtatttacctgacaagtctgatcctcatccataggaaacattcatgttttttccacctcaacaatgtctggaagaacacatgtccctcatgcagcagcacctcttctccccccactaaagcagctatccaggcatgttttgttctctacacttcccagtgacccccttactataggggcagatatcaaacttttggggatgtgccattaaagtccctttcaccagacaggaggagagacacactttcaagggcttgggaactcatagctatggagaacactaaaagaaggggaatggcaagagatgagggaagaagcaaactctacagcactcacctcttgctgctaacctgctgagtcactgcatgaatcagaaaagcctgcagccaagtttgagagagatatacccaaatcataaccctcttggggctatggcttctgagcagtaagcaatttagaaaggcaagcttagaaacactggctggttaacttttcaccttgcctgcaactttacaggattcaggccttcaccatggcattttctctgttgccctatatgaatttttatataaccctcacaaccttaactgatcaccttcattttttgtcactcttatttgacatatttgacctcaaatgccagtatttaaagcaacattacacatttttcctccaatatcctcattttactgaaattggggctcacagtggcaggatcacagacaggacatgtcaggtaaactgaatgtcccaggccccctgagcttgtgcatcatcagccagattcactcaagaaaaaagaaaccacactagtcctgtaaacagaaggaatctgacatagggagctggttaaacaggcctaggagacggaacaaaaagccaagagggaagagcaagggcacactaagacagcaacttcagggagaaactcttcgctcccaggctgggagcagagggaggaagttgtgcttactaagagcctgcagcttggaggagagatcatcaagctgggagccagcctcatgaggaggaggctggtgttagtgtctccaagggaatgtgatgaggctggttctggcactgcagaaaaacctggaaacaggaacacagcaaccagcttccgtcactggggtgaagaagtattattgggtgatgtgagcagaacaagaaaaaacaaaaaaacaagtcctgtcttcctcacccagctctccagtctccatccagcatcctctattagcagaactaacagagagacccatggcagaagaggaatgtggtttgcaggttccaatcacagcatcatgaagcaaagtataagacatggtttgcagctgggagataacagctcaataactagtaaaacatccagatgaggccaaattaatgttaatgcccaaattttgctaactcatagcacacactgtcaagagagctattttcttcctctgccacattcttgccaagagccatgaaatagaaacttttgacctctcaaaagttttcaaaagtaatcttctggacttttctctactcactaactaattccttcacatcacagcttagcctgcatctgggagcttttcaacccagcatgccctgaagtcacattcatgttctttcctttgtttattgaggagcaaagacctactgcagtccagctgctctgcctgtatctgggtggaaaataagcaagactcaaatccaagcatgttctacgaaccaacttcagcaacaataaagtgataccttgaatctttctcactcttatgtgtatatctcaattcgttcacaacttggagaggaaaagagatgaatgatttctctctgaaacattttatgcaagcttacataaaaatggactgtcacccactgtgatagtccactgtgtcaccaccacccctcctcagcctctctgccacaggtctgcctattatgtctggaaggttctgggatgcacacattctcagtccagtctccaggctgaatgcaacctcccagcagctacctgaggagctcatctcagccttcatgagaacatgcttccttgcccagagctctgcttcccaatgtcccacaaaaattcctgggctccttttagtccctttctaccagagtaatgctgtgtttcaggcaaacatggaaaatagatatttctccatctgtgtggaccttgttatcagagtccaaaccatctaggctgtggccctggtctcccaaagcccccagctgagtccttattttagtattgcttagagagagaatagatatcaaattgttctcaccatcagttagcacagagtagcacatttctgaccactggagcccatgctggaacatcatccttgtgggcccctttccctccctatcaactcatgcaaattgacacctgggaaagaagtaggattaccaacccctcaatttaaaagacgtgataaagctttgaatcccagtttgggctcagctgttatcaccttgtatcaaaataattttttagtccagattctttcagttacaagtgttagaaatctacctaactcaacttcagacagcaaactgaagctatgagctcatgaaaatggatcctggtgctcttgcagtaccatcaggattcagtctctgccaggcttctccttaagctgccttcagatttaatagactcacatcgtggtggcaaaaatgtcaccaacagcttcaaagttcaatttctaccagttcagtgactccagctaaaaaataactgtgctattcaaaacgtccaacaaaaatcccagctctaaatattattggaccaatctgagccacatggacatccctgaattaataagcactgtgacctggggggcggactaaaccaagtggccatccttgaatcaagccattccctcaagagacaggagtggaaccagccaagctagccacaaaataaagcatggacctgggtgggctctacaaagggaaactgcaggactttaaccagcggaagggaaagcaaatgccagacaagcaggaccacagctcttcctcaatgttgtgggaaatcagggaccccaaacagagggaccagctgaagccatggcagaagaacgtggattgtgaagattttatggacatttattagttccccaaattaatacttttgtaatttcttatgcctgtctttactgcaatctctaaacataaattgtgaagatttcatggatacttatcacttccccaatcaatacccttgtgatttcctatgcctgtctttactttaatctcttaatcctgtcagctgaggcggatgtatattgcctcaggaccctgtagtaattgcattaactgcacaaattgtacagcatgtgtgtttaaaccatatgaaatgtgggaaccttgaaaaaagaacaggataacagcaattgttcagggaataagagagaaaaccttaaactctgactgccggtgagctgggtggaacagagtcatatttctcttctttcaaaagcaaatgggagaaatatcgctgaattatttttctcagcatggaacattcgtgagaaagagaatacgcgcctggaggtataggattataaacagccccccaggtgtgcctgtctcttatggttgaggctgcagagatgaaataaactccagtctcccatagcactcccaggcttattaggaagaggaaattcccacctaataaattttggtcagaccagttgatctcaaaaccctgtctcctgataagatgttatcaatgacaatggtgcctgaaacttcattagcaattttaattttgcctcggtactgtggtcctgtgatcccgccctgcctccaattgccttgtgattttctattaccctgttaagtacttgatgtctgtcacccacacctattcgcacactccctccccttttgaaaatccctataaaaacttgctggtttttgtggcttgtggggcatcacggatcctaccaatgtgtgatatctcccccggatgcccagctttgaaatttccctcttttgtactctgtccctttatttctcaagctggctgatgcttaggaaaaatagaaaagaacctacgtgattatcagggcaggttccccgatactccaataccatgtatgtccatcttttgactaatttttgtgtcttatatttatattacatttacttcttatgtattgtaatatggaagtttcttggtagtccccaaactacttagcaaaaacctggcaaatgctagttgattaggttctcagaattctttggtacccgttgccctgtaaaaaataaaacctcttttgggactatgaaaacagagtgagagatagctgtatctctgaatggcaaatgggacagtcaactccctcaattcagagaaagtctggttgccagaggtttttaaaattaaatattcagccatgaggaattacaccaaaagcaaagcctgagaaaagaaagtaggaatggacattttgtttgggaggtgatctcaggaagcaggagtgtgggagctgagagagtggtcaaaagaataaagattgaccaatataaggatgcactgttcaagtcactgctgtgagcaaaagcagctcagttctgccggggcctcttgagaggcatggagaatggctcccagaattatcatctcaggacaggcagtgtaggctttttttccagttcctgtccctcattgctgaggactgcaccttgaggcaatagttcttgaaaccccacttttgggctgtagcatcagagaaatgctgagttggaaatagaggcaaatagcacaagcttcaggttggtgactgtcagaggagaccctgagcctgggtggaactgtctgccatggccccagctctcactggaagagggctgaggtgaggtggacaaaggtaccagggtgcatgttacaaggtgtgcccgcctcagggagttctgccagaccatttctcagcctgggtcagagatggacccagttcagatggataaaggtggctggatcaagctgccattcctactaaaactgtttaactacattaaaaatcaccacatttctggtcttgccagtaccatcttcctcctccaacaaacatgcatagttttcaacccattttaggacagatgtgtcatttcacaccagctctcaacattgcattcaaaacctaacagatatgctttgagactggagtagccacgggtcaggcatggtagagactccattacagtgccgctccccctgtgacctcagcattgctatcttttagtgaagctgtaagactagtaaaagacaaacatgattttctccaggcttgtttgctcctctctgggtatgaggcagcagcatatcagaatgaaacagaactgggggctacaaccctagaaaactgagctcaatcaaactggaaaatacatattctccaaccaaagccataaggttctcttctcagatgccaacagctgtgacaaatctgcatttcccttgttttcagtcactctctctgggccctcttggatcccttgcacacacctccatcagcctgcctctgggaattgtcagctgcagttagtgggacagctaggctgggtcgagagaggcagccctctccagagccaccaaaatcatcagacagtgagaatgcagcagacacggtcctgcagtagatgtggtccttctctgaaggactaagtggattaccgagaatgctggccacagggaactcttgatggcatttgtgaaatggttacaaacacaaaacctgctgcctttatttatggtcaaccactgaacatctttccaagcctagcctgtaatcctcagtgctaaaataataaggtaggcaagctgtgtttcttgattctaagagtctatgattctgccctagaaaacaaagtttatagttgctgaggcaggatcctcagggttggcttttctccctacccctgatacatgaccagtgaaaaccacaactacaattctaagccccccaactgactgaatagactccctcttggctaaggaaatcccaaagaaacccaaaaaactagttcaggccatagtgggaaggaacggtcacacatgccttcctttggagtttaggtaaaactggccagcattaacattagaacagaaatcataagactgacaagatagaccgtttgtagcaataagacaccaaattccaacctgactcaagtagagcattataaaacagcagatgctgctttgaagaaaatcaaagtgttttctctctaaatatgtttctttaacatattttgaaatgaccctacaaagatttcttttgtgggggaaatttgtattctgtagagaatctccttcccttactaggtcttttccagagagtctgacatcctttatttatcattttttttcttgagatggagtctcactctgttgcccaggctggagtgcggtggcactatctcagcacactgcaacttccacctcccaagttcaagccattctccttccaagtagctggaattaaaggtgcccaccaccacaactggctaatttttgtatttttagtagagacaggtttcaccatgttggacaggctggtctcaaactcctgacctcaagtgatccacccatctccgcctcccaaagtgctgggattacaagcatgagccaccacgcccagcctgacatcttttaccaactaccctctctgaagtctgctacctggaggcttcatttacattgtaggtactttggcttccacaacctcctttatctaaattcaagcattttttattttttctttccaacttttattttaggctcaagggtacatgtgccagtttgttactgggtaaatttcatgttgcaggggtttggtgtatagaaaattttgtcacccaggttatcagcatcataccagataggaaatttttcaatcctcaccctcctcccaccctcgaccctcaaataggccccagtgttacttgtttccttctttgtgttcatgtgtacttaatgtttagctcccacttttaagtgagaacatgtgatatatggttttctgtttctctattaattcacttaagataatggcctccagttctattcatgttgctgcaaaagacatgatcttgttctttttttatgactgtatagtatttcttaatgtatatgtccagtcactactgatgggcttctgggttgattctatgtctttactactgtgagcagtgctgtgatgaacatacacatgcatgtgtctttatggtaggacaatttacattcctttgagtattaaggctggcttcaagcttttcaggcataggttaaccttttcaacctattgccaatcaaaaaaaaaatctttgaatccatctatgacctagaatcccctggcttcaagacatcctgtctttctgggtcaaaccgatgtatactttccatgtattgatttatgtttttgcctacatctgtcttactaaaattcataaaaccaaactgtaacccaatcaataggttcccaggacctcctgagactgtatcacaaaccatggatcttaacctaggaaaaaaaaaaactctaaattgattgagatctgtcttagatagtttttggtttataccaacagcacatccaccagctgtttttctcactaggtcaaccagtaaaatcagtaaaatgcaatcactttcaatttcctcctcacccacaaatctcttctttgagcaaaactttgcacgtccaccatgttgctaagacaggctcttgaggactcctcccaaggggagtagctaagtcaggtgtggaggctagcgaagaggcctttgggggcaaagggggaatctccctctgtggatagatgctggggtatgagcacagagaaaagctgcctcttttagcctatttttccccaatatctgttttactttcataacaattccttaaacattctttcatcacagtcttaacaatgactttatgaacaggaattcttaaaaaatgtttgcaataatgtcacttctgaagaatgttctcctgccttcacctgccttccagactccaacaagctttgcttctgtctcccacccacacgcaccactaatgtctcttgtgaaaggaaaataaatcttgaggcccccaaatcactaagcttaaggaaaaagtcaggctgggaactgcttagggccaacctgcctcccattctactcaaagtcacccctctgctcccctgacctagatgcatatctgatttgtctgcttttggaaaggctaatcagaaactcaaaagaatgcaaccatttgtctcacctatctgtgacctgaaagccccctccccgcttcatgtcttcaagtgtgccaccctttgcttcaagtgtgccacctttccaggctgaagcaatgtactttttacatacattgattgatgtctcatgtctccctaaaatgtataaaactaagcggtgccccgaccactttaggcacatgtccttaggacttcctgaggctgtgtcacggatgcgtcctcaaccttggcaaaagaaactttctaaattaactgagatctgtctcagattttctggttttacactctgttgtcttagtctgagctcctcagaagcagacactgagataatgtgtcccttgagtgcaaggggaatattggaaagacaatcttaggcagcatttgtagatgagtcgggtatgagacaggaagggaaggcagccgacacagggcacattcagggatggtgtggcctcaggcagctgtggccccataccctcagggggacctttgggaaatgatgtgacacacaggacagtcccacagtagggacaaggatctgaggtgtttccctaccactcctattggttatcactgagggtactccccagggtgtcagtgtcctgaactctcaatttaccctgcttatgatgcaggagaaagccttcaggtcttggagagtgacagacactcacagaaatataccaggaacacatacaggaagcaccgaggggatccaggcaggacaccaaccgcctcttcaagtcccctagcctgctggtttcagctgtgccgtggctgtcactcctgtgagccccacaccctcctggaatcagaaactgcctgccatctctctgtctctacaacacccctcagaagactcagttcatagcagatgctcagcaaatgctttcaaaagaaacagaagcagtagcatgaggtaattgttgaccaagaaaactcagaaaacatttatttgggcaagaaagtagaacgaagaaacccaccaattcctagtggaggggaagaagattggagagggatcttcagggcatggcataaagcctgttccgatggagaaaccaaccatcctgattcccccttgctgccctgggagccacttggcattaaaaggtagctttccagggcaaagacttcccctggagagactgcaaagatctcctgtcctccctataagtcagcaaacaggcatgactgtacgtttttggttttgtctgtgtctttctggtcttcccagccatcagagaagagaggattgggctttcttccatttaagttctgggctgtaaaggcacttcctgagtaggcctgaggggctgtggtgagagaatagggctttgtgtagaggggcagcctgggtggaggctgcctgggaagcagactgttgggagggtgtgagaaggtgccctgcagcacagttcttgcctgaagacctcctggccctcacctgcttccccacgtctgctactagcactgctccatctggttgccttcaaggaaaccctccaatatcccctgtctccttccccaggataactttaagatcaaaaagtgtatgacaagagatggagaagaggagcttctgcacttggttggagaaaagaaagggaacaagtggaatttgtaccaaggaacctggagcttgcatttaattcagactgattcagctgggctaggctctgtgactctgcacttgtaacgagttccaggtgatccccatggtgctggtcagacacttcagtgagcagcaagtcaccaggtgcctgagctggtgcactgcggagtgcacacatctattacagccacaaattacacaaggccctctcctttggctagaaattacatggggctttgattgcatttctttcatgattagtgatgtgaggcattttttcatatgtttgttgaccattcctattatgtcttcttttgagaaatatctgttcatgtcctttgcccatttttctacaggattgcttggtttttttcttgttactttgtttaagttccttacagattctagatattagtcttttgttggatgcatcatttttgaatattttctcccattctgtaggttgcctgtttaccctgttgatagtttctcttactgtacagaaactctttagtttaattaggtcccgattgtcaattcttgtttttgttgtgtttacttttgaggacttagtcataaattctttgcagaggtcagcgtggtacatatgtaccacagactactacagacatgaaaaaaggatgaaatcctgtcctttgcagcaacatgtatgcaactggaggccattctcctaagtgaattaatgcagaaacagaaagtcaaatacaccatgctttgacttgtaaatgggagttaagcattgagtatacatggatgtaaagatgagaacaacagacactggggactactaggtggggagggagaaggcagaaggttgaaaactaactattgggtactatgttctacgtactatgctatttgtgtgatgggttcaatagaagcccaaaccttagtaacacacaatgtatttatgtaacaaacctacgcatgcacctcctgaatctaaaataaatgtttttaaggaaagaaactataaaaagctttaatttattattgtgtcaatcagagtccttgcagtaaagagatggctcacctaaattggacaatttgaggagagaataatattgctattttatacatgatatcttaatgaagatatcatgtgtaaaagtgtgggcagagtgtaggaaatccaaaagaatagtgcaacatcccagggccagtcacacagtagaggagagggcctttgatgggagccttggcctttggccaagagagacagccagcccaaataatccagaaaaaaaccaactcccctccttccctctgatctcctctgccctctcatgggtcaaacgcaaacctggatcaaggaaacgctgcctgcccaggtcagcctcctggggccttaacagagtggagcagagtaaagggggtatgaaggggcacagttaaatgtctacatgttgtaagtccttgttcagctgcctaagctttttctgagcaagttcaggaatatattaatataaaccagggataggcagcactgtttgtaaattaccagctagcagatatcttagtctttgcagaccagactatctctgtcacagacactcaacttggcctttgtagtgagaaagcagctgtatgcacgcagtaaaccatgagtgtagctgcttctaacacaatgccactcacaaaggcaggcctgcgggtcaaatgcactttgcccaccctgatagaaacacactcacacattctctctcttcctccccactcctcctcattctttctccccctccaagcgtgtgctgcaacaggaggaggtgaaactggatctgatttggggacaaggatggtttgcagagaggaatcggtgaacagtggtgggaaaggaaaagaaacatccagaggagattggtgagcaaaagtaggagtcatctttgtgtaagagggaaatagattttttttaaaaaatggtttaactatgaggactatgcaaatcaggcaaaaacaatcagggccaccttcaagaggcattagggagacacaggaatgggggtcccaggaggatggccccggcaggaggacaggccaccacacagcatccccacatcggccccagtgagagctgcagaaaggctgtttactgtgctggatcccacaccaaactactgattaactgtgtcacagcttaaatgtgtcattttgtcagcaaacttgtatcttcctacaagctgttaattaacgtgtcagaaaaagcgacttgcagaaggcttctcggtgcaaaacaggagcccaaaaccaaccactaagcagcacattcagaaatggctcctgacagacatgcacagatatggagcagatgcggtctgccggccagcattctaacacacagcattctaatcccaaatccttgggagcctcaaggaatgaccagctgtgcatcatggggaaagggcggcagtgggcagaggcccaggacagctctacttaaggctctgggagactgtagcggagacagccccggccccatcctctctgccttaatcacctacaggcatcctgccgttgtccacactgccccacctggtgctctctctgcacagggatggggtcaggctggatacaggagggcactaatgctactcccctccccagcagccctcaggcaaagacagagacaagctgaagtcagaagacacataaccagcattctcagccctcagtggaacaactatcacatgacacccatgtcccttactaaaggtcccatgctaacactgaacccctgctgcccacgatgacagataatctgctcatattgtctgtggcaccacccccaccccccaccacgcccatctcactaccatagttcctgcaaacgcttgtgttcacatccttgtctcagggcctgcttcttggaaaactcagcctcaggcacttatgtcccactctcctggggatgaggaatcgagtacccagtcttgggaaagcccttgcttcccagccacgatcagagggaagcatgctaactcatctgggctcgggcatcagggcatccagagaggaataaactggttcccatcaggagatcatcgtaagttagggttaagcaactaccattcattgacttgtggccagcatgaatctctgcactcaccatgaagtctccttgcacctgtctgccccttcctacctggcaaatcccaacccaaagccatggtatgtccaaaatgtcacatttctgttttgtttttaagttaccgtaatttcaactctgagcccacattcctctagcttctgtcattctcagaactgcccattctttgaaaaccaaatccaacctcacccaagtggcacaaaggtcctagttaaggcatgaaccatagaatcagatgacctagatcttaattctgcctctgcaaattattagctgggtcaccttgggtgagctgttgacttttgtgagcctcagtttccccatctgtataaagaagataagaacagtaactgcctcatggggatgttgaggattgaatgaggtaatatgcgcaaagcacttaggacagcacctggaacttggtgagctccacagaagtgtccatcccaggtacacggcccctccaggctggcccttctgctgctgaacttcaggtttataaatctcaggaaacagacacattgcaagtctctgatcctgaaagccacaagcctcccccaaccttccatcaggaaggaatctaatttgagtcctgcaaaatccttcccactctctgtgttcctccgtgacgtccctctccaatctcctccctggcgtacctccccgaggggcttcagagacagcaaccaggacaggccgccttgccaactatgctgtgctctgccctccattcctcctcgaggcaagaaagaaggggctgtagagccctgggatagggaatggcaataagagaagtagagagaaagcgcccatgaacaccacagagggaattacctgctgcatgttcgtcatcgtggaatggttatgaatgactgagtgtgcagcaggcactgtgctgagccctggaagacaatgccagggaagacagtgccgggcaggtccccttcttacttgtcaggaagcagtgctgcttcaatgtgaatgtgcacacaaatgcttcccagggcttccaagccccattcacagcaatcacttcggaaaaccatgaagtcgcccaaaatctccatttttttttttttttaacagagtctcactttgtcaccaggctggagtgcagtggcgcaattttggctcaatgcaatttctgcctcccaggttcaagcgattctcctgcctcagcttcccgagtagctgggattacaggcacacaccaccacgcccagctaattttttgtatttttagtagagactaggtttcaccatattggtcaggatgtctcgatctcttgacctcgtaatccccctgcctcagcctcccaaagtgctgggattacaggcatgagccaccgtgcccggccagaaatctccatttttaataaacatacctgcggactggaatgtagatcgtcctcaggccctaccttgaagacaagcctaggcctaaaatgttaaataccaggggaaagcagccagtaagtgcacagagttcagaaattgcagttgagtgcattatggtgtgactttatctcttctgtccggtgttggcaaggagaagctgcctcctatttccttatgttctgcagcaagcatggtgtcatacaaggaagctgcgaggtatgggtccctcaaatgattgactggggaagagacgggaggggctggcaagaacacaaagtacagtcagttacccaccgcctgctgccaacattgcattggcagagcaagctgccagcttcttgatgatcctgaactctcctgcaagtagaggcaaagcaaaagcaagtgtgaaacatgcacgtgtattctccgaagaggttgacccatgaacatgcatggcattggccagtcccaacagccttgagctacttgtgtgacaccaccacagctccagcgtaattatctgtctctctccttcacctgtctcaggaagccaggccaacctgaagacagcacatgtaggctctggctacgtctctcttggtgatctagcccagcctgggacacctccacctgtctccgtctcctggaaaaagggccccgggactttggagtatggcctgcccataatgagggaggtctttagcatgattctcagttgtaagcttgggctagacttgcagatttagaatttttttctccgattaaaaaagcacattcatgtatgccttacccaagaggaaattctgaagataggaaatatcatcaaacgaatcagggtaaatgtttgaattgtccaaacattatttgcatgcctcaattttgtgtaatatccctttaagtgattttattatttatttatttaagagactgggtcttgctctgtcacccaggctggagtgtacttaggctaaagtgatcctcccacctcagcctcctaagtagctgggaccacaggttaattaaaaaattaaccaaacctggctaattattttaatttttaattttgttttctttttatagagattgagtctccctgtgttgcccaggctagtctcaaactcctggcctcaagcagtcctcctgccttggcctccaaaaatgtggggattacaagcctgagccaccatgcctggcttctttaagtgattttaaataagaaaggaggaacggtgataataaagaaaagaggaacagattaagaagaaagtggagagggagggaaaggaagagagaaaagaagcaaggatgcatgcggaggctggaggcaggggaattgcgtctggcccgccctctgccatgaaatcccgaccttgcaagtttccacgatcttgcatagggaatcatgagacttcaggcttttgtctccatcagaaaccaatcagagccaggtacactgctggaagcagctcctgcttgcagaggatgccaggtggacagtggcagtcccctccccactgaagcctctgggtgagcagctaattcccaccctgacacatagacatctgagaaattttggcattcttttccagtagtagccacctacactgtactctgatgacagcctcccttaagcagaatgccagagctcggcaacacaaccaggagactatcactgtctccaaggcttgggtttgttgtgcattcttgttgatttcaaaacaaggcaaaaaagcacacccctcatgtgaaaaagtaaataaataaatcaggctggacctgcccctcctgctatgaaaaatcaaagtgttccttttcctgggttctattagagaaaggagcagctcaagttcaaagccagaagcaggagaattgaaggaggacatgaaagcattctctccccttaaagaaagtgcagatcccatgaaagataacccatgaaggttatctttcaggaactctagtcctaacttgattagtgtctgtgctaggattgagaagtccaagggaacacgtgccagggttgcatatggggctgaggaggggaagcctcacgcctggcagtccctggcctggggtatgccatacagcaccttggttccaagcctgtctctctcatcatccatctttctctccccctgggaatacccaacacactaaaccctatcaatctccataaaacaccactgcatgtacaacaccccttgcccgtaatgcttgcttggttctccacttccaaaaacccagcctttcgggcccctgctttggcccacttgttgcttcctgtgggctagtcaggccagaggcccactcagacaccaaaatgacagcattcatcaccagctccaaacttggacctgtactgccctttcaacttgctcctccccttccccattcaaatctccaccaactttcaagccttatccactcaggaaggcctttatccatctcatcgctgagtcccagctctatgccaggcactgttctaggcaccaggactgttggtacctcctttccccaagatctcaaaacacctgtttgttccatgttttcagccacttgttgaatactgtcccagagtttccctcattaatcataggagatcattcaatgagtcagtgcctcacaccttccttatttttttagacggtgtctcactctgtcgcccaggctggagtgcaatggctcaatctaggctcactgccacctccgcctcctggtttcaagtgattctcctgcctccgcatcccaagtagttgggattacaggcacccacaactacacctggctaatttttgtatctttagtagagacagggtttcaccatgttggccaggctgttcttggacttctggcctcaggtgatctgcccacctcaacctcctaaactgctgggattacaggtgtgagccaccatgtttggccacaccttccattttatacccagccattattttctctctggaagcttagggggatgaccagaatgccagcaaagagcagattttcatgcaagcagccaacaaactcatttttaaaagttcaacatcacatcatcagagaaatgcaaactaaaaccatggtgagataacattttacaccaatcagaatatccattattacatggaatcaactaaatgcccataaatggtagactggataaaaaaaaatgtggtacatacacaccatggaatactatgcagccataaaaagaacaagatcatgtcctttgcagggacatgaatggagctggaagccattatccttagcaagctaacacaggaacagaaaatcaaacactgcatgttgtgactgttaagtagaagctaaatgatgagaacatatggacacatagaggtgaacaacacacactggggcctaatggagggtagagggttggaggagggagaggatcaggaagaataactaatgggtactaggcttaatatctgggtgatgaaataatctgtacaacaaaccttcatgacacaagtttatctatccaacaagcatgcacatgtaccgctgaacttaaagtaaaactcaaaaaaataaaaaataaaaaaacaacagatttgtcatgaatacagagaaagggaaaggctcataccatgttggtaggtacataagttagttcatcctgtatggaaaacagtacggagatgtctcagagagctgaaaatagaactaccatgtgacccagcaatctcactactaggtatctacccaaaggaaaatatatcattgtattaaaaagacgcctgcattcagatgttcatcacagcattattcacgatagcaaagtcatggaatcaacataagtgtcaaccaatacatgattggataaataaaatgtgctatagattcactgtggaatactatgcagccataaaaatgaataaaaccatgttctttgcagcaacatgagtgcagctggtggccattatcctaagtgaagtaactcagaaacagaaagcccaataccacatgttctcacctataagtgggagctaaactatgggcacacagagatactaggatgaaaataatatacactggggactcgaaaagcagtgaaggtgaggaggtgatggttgaaaaattacccattaggtgaaatgtttactatttggggaatgcatacactagaagcccaattcccactagtgttcaaaatacccatgtaataaatctgcccatgtacagaatctaacataaaatatattttttaaagtacatttttaggcccggtgcagtggctcacacctgtaatcctagcactttgggaggccaaggtggacagatcacaaggtcaggagttcaagaccagcatgaccaacatggtgaaaccctatctctactaaaaagacaaaaaaaaaaaattagtcaggcctggtggtgtgcacccataatcccagctactcaggaggctgaggcaggagaatcccttgaacccaggaggcggaggttgcaatgagccgagattgtgccactgtactccagcctgggcgacagagcaagactccgtctcaaaaacaaaaaacaaaacaaaacaaaagattagatttttaatgatgggagatggccccagaataactgctgtggttcttagaacaacagaaataatagctatggttcttaaaacaacagaaagaaaatcatgggtggaaatcctgagtctgtttttgtttgtttttaacctctccaggatgcaccctgaaagataagtcaatgagttgatgtctgctggtgaaagctctgatgtaagagggaaagaagctacttgggagaaataaactagaaaccagaagaggaaggaatattcttccccaaacacctctcttaggaaggggaaggaagggtggcatttgttggaaataccttcagatgctgagggtgggagctgtacagccttaatgctgagggagaggaacagtggaaatgagctctgcaccaaagaggagaacaggtttgctctgaaggcgggtgggagaaaaaggtgaaggaaagcaggttaagaaagaaaagagaagatatttacggtaggcagctgtgcagtgtgcaaagttaccatccctcatagcctgaaatcctccaaaaagcattaaaaaacttacaaaatgttttctgagtggattttttattgtacctataagttgtttttattatacttataagttctagggtacaagtgcacaacatggaggtttgttacatatgtatacatgtgccatgttggtgtgatgcacccattaactcgtcatttacattaggtatatctcctaatgctatccctcccccagcccccccaaccctatgacagggcccagtgtgtgatgttccctgccctgtgtccaagtgttctcattgttcaattcccacctatgagtgagaatatggagtgtttggttttctgtccttgtgatagtttgctcagaatgatggtttccagcttcatccatgtccctacaaaggacatgaactcatccttttttatggctgcatagtattccatggtgtatatgtgccacattttcttaatctagtctatcattgatggatatttcggttggttccaagtctttgctattgtgaatagtgccgcagtaaacatatgtgtgcatgtgtctttatagctgcatgatttataaacctttgggtatatacccagtaatgggatggctggatcaaatgatatttctacttctagatccttgaggaatcgccacacggtcttccacaatggttgaactactttacagtcccaccaacagggtaaaagtttccctatttctccacatcttctgtagccctattgtttcctgactttttaatgatcgccattctaactggtgtgaaatgctatctcattgtggtttgattcgcatttctctgatgtccagagatgatgagcattttttcatgtgtctgttggctgcataaatgtcttcttttgagaagtgtctgttcatatccttcacccactttttgatggggttgtttgactttttcttgtaaatttgtttaagttctttgtagattctggatattagccctttgtcagatgggtaaattgtaaaaattttctcccattctataggttgcctgttcaccctgatggtagtttattttgaaaagaggaagtcaaattgtccctctttgcagatgacatgattgtatatctagaaaaccccattgtctcagcccaaaatctccttaagctgataggcaacttcagcaaagtctcaggatacaaaatcaatgtacaaaaatcacaagcattcctatacaccaataacagacagagagccaaatcatgaatgaactcccattcacaattgcttcaaagagaataaaatacctaggaatccaacttacaagggatgtgaaggacctcttcaaggagaactacaaaccactgctcaacgaaataaaagaggatacaaacaaatgggagaacattccatgcccatggataggaagaatcaatatcatgaaaatggccatactgcccaaggtaatttatagattcaatgccaaccccatcaagctaccaatgactttcttcacagaattggaaaaaactactttaaagttcatatggaaccaaaaaagagcccgcattaccaagacgatcctaagccaaaagaacaaagctggaggcatcatgctacctgacttcaaactatactacaagactccagtaaccaaagcagcatggtacttgtaccaaaacagagatatagatcaatggaacagagcagagccctcagaaataataccacacatctacaactatctgatctttgacaaacctgacaaaaacaagaaatggggaagggattccctatttaataaatggtgcttggaaaactggttagccatatgtagaaagctgaaactggatcccttccttacaccttatacaaaaattaattcaagatggattaaagacttaaatgttagacctaaaaccataaaaacactaaaagaaaacctaggcaataccattcaggacataggcacgggctaggacttcatgactaaaacaccaaaagcaatggcaacaaaagccaaaattgacaaatgggatctaattaaactaaagagcttctgagtggatttttagtaaaattcagggaataaccagagacatggggcaaagcagcaacagacagcaaaaatgaagaatccaggtgcatttgctaagagtttagggaggagtaagtcttctctaagttatgaaattgaatgtaccagaacaaagaaaacaaatgaaaaactcacaggcagggtgcagtggctcatgcctgtaattggagcacttcagtaggccaaggtggaaggatcacttgagcccaggagtttgagaccagccttagcaacatgtcaagatcctgtcttcacaaaaaatacacagattagcagagtgtagtgatgcatgcccgtggtcccaagtactcaggaagctgaggcaggaggattgcttgagcccagaagtttgaggctgcagtgaactatgatcatgtcacagaactacagcctaggcagcagagtgaaaaattctctcaggtaaaggaaggaaggaaggaaggaaggaaggaaggaaggaaggaaggaaggaaggaaggaaggaaggagagagaatgagaaaaattcacaaaacatcaaaaacctggagaatttccaacacccagtttcagagatgtagactctcgagtgcatagatggggctgcatcctggaaggagctaggttcctcagcatcctgcctccaggaggaggctcctgagaaggaaaggcctggcctaggagcttaggcaccccagcttcccatgcacttgatcagtatcacctcttctccttgctagagctcttttgataagtacatgtcatcaggactttgagtagcttagagctgccaggccttgtgtctgcaagtactgatgatgtatcacaggctgtagcctgtctttctacagcctgatagacacccccatggaaatatgggagcccagcctcctctcttcaaggctcctccacggtctgaatcagaagtgtgcatcagaataacttgggagctgttttgggtcttactaccctcgcaggtccgtcccttccacttctcagtgcattgctgctgtgttgctctaattcaccttcaaaccactcaccccagggaggcttcagccacccccaaaccatgacgtcattgatgccaccatcgtattcaggacagctgttcattccctcactgtggtatgggtaggaaaatgatgcccccacctgtgttagcctcacttcaagaggcccggtaacaggatggatcccacaggattactccctctgcttagaacatgtcccgctttctccccaagaggggcacacatgctgcagcagggcaggtcaggaggggcttggagcctcactcctggtactgaatccaactttttctcccaggccctcttcctagggtgcttctttcccagggcctctgcttcctgggttcttggcttggcttccactgggcctctctcaatatgcctgccccaaactgaacgtccatccctgacatcaagtttccatgttaatggagtatttacagaggaagtgaaaagagccccaggactcccatgcccccatccaccttagtcaggctcagccaggacacctggttatgtcctcaggtacctgtctcttcacccaacagtgagcctctgggagatgaggaacacagattcaggggcccagcagcattgttttctaaatcgcccttgttctccctctgcattttactcactgggtgaccttgagtgaaggccttcctctctctttgcttccatcctcacgtctgtaagatggcaatgcagctgttacatagaggtgccaacaaggcacccttgaaactctgagagctaaattacaaaactaaggcataatagattgaggttggatggagtcaaggacatctaaaggacaggctgccttccagagcccgagcaagagaagccatgagctcagctggagcctaagggacagagccattaacaaacctaaagaccatgtcaaaggtgggggtgggagcagccctgaggcactctttgggcccttccccaggtctgtcccagggggagaggggtgggatgtgcctacatggtggagcctgatcccgtgaaattttgaagtccctctaattcctctcgcactgactttatccctgcaaatagacttccgatttctttttctccttttggtttttgtggatgaactaatgctttgtaagcactttgaaaactagaaatcattacacaaagttaagaactcactattttaacatggaggatggagcctgacatcaggcctttagggcacgttcaccatgccaagaagagaaaactaccaacttgtaaaacagcagaagcatttgctaccagctggcatgtaaagtcccctgaaaactgaacaatagagatattttcaagaaaagacaaatgatcccagtcttgggatcctgacagctgcgttgtcattgtggtttgagggcttcttgagcattgctacaccccaaagatgccttgggacagtggtgctcatctttttggaaggctattttacttagagcactgctagctgtttaacaaaaaaacccggaaatgtccgtggcttaccacaacaggagctcgcttctagcagggtgctactgtggctgttgtgggtgagcaagccgcattcctcatgtggaggttcagtgaccgtctccttccatctgtggctgtaccacccctaaggcctcagaggcttctgcagtcaatcagccaaaagagaaagatacagtgtagggggcgcgcctgctccctaaaagcagtcgggatgtgacccatcttaccgaggtaggacatcagcacttgtttctcagtcccaatgagatgaagtgaagaaaccagcagagaccagcagatggcaaggaaagggacccctggctgccctcactgtgcattagcacgagagcacaaggcactcccacaactgccatgacaatttataaatgcatggtgataaccaggaagctactgcccctttctatggcagcgacctggaaattgccacccatttcctagaaagttctaaataacccacccctcaatttgcatggaattaaagtggacataagaaagtgtaaataccattgcctgtggactctgggcgcactgcctatgaattatccctgacccacaaggaacagtactgttcaatgaaaaattgccatctcacaccactggctcgcccttgagttttttcctgggcaaagccaagaacactgccaggctaagcctcaattctggggctcacctgtccacctacatcattactctgctcatgcagcactgccaaaaaacttttcacatggccacatctggaggtaaagggaaacatatccctggccagccagcttcacaccacagaaggaggcacaggctttggggtacggctagctgacactgccatgggtcataatcccccttcaaaaacagatgaaaaccgagagctgtcttcccatggaaggagaaaaagacatggctccctaagggacccattcattcatcaacattccattgattaaatctgctactgaaggtttttgagcagagtaaacacattcatatattatattcatattcctcccccctctgtctctctgtctccccacctcttcccctaaagagagaaaaatgaattttaaaaatagaaagaaaggagggacaattcagaaacaagatatttcaaccaatatttctggaacaccaagtagagggaaaagtatttactgatgtagaaagaagaaagttggtcccaagaactgtggaagagaggtcagctccttaaaacaacagaatgctttttaaaataagaaatcagccaacaagggagattaaacatgtaattactgaaattaaaaatagaattactgaaattacagtgcaaaagaaagttttgagggtaggattgagtagaatgacaacaatttggaaaataaaaacaatatgaaaaatagaaaaaaaaaaagaatactgccagttgatactgtaagctcctggagtcaccccaccgcaagggcactggtgactagtgaggggtgcatgtcctcagcactgccatgcaagcccaggagctattagagattgtactgaagtattggagtcactagtggaaattggagcatctggaaaaatgggggagggatttttaaaactgtattttaaatatgacttttcctttgtctaaattaaagtattcaagtagctaaaactctggggcagggagggtgatcccctggtttgtgacctcactcccctgccttaagctctctgagaaagcgcatgctggttctggtctcaggaggatgtatagccatgagcttgggggcaccccaccttttatccactctgtgaatttctcttcctctcccaagtagtacatttccccaagtgggagtcagtccatctagaataatgcagtaggaagtctgtggttgtgagtccactgtaatccccaggttacatgcagagatgccccaaatccaatcacctttaaagtagtgtgaggttcaaatacactctatgttacaattatccagcaggtgaatttttaaacacacacacacatacacacacacacacacagcaaacgttaagatacacatccaaagagaaaacttgaaatctcagagagagcacaggctctgggactgcaaaatcaaatgacttttaaggaccgagtccaggcagttaagccagtcactgtgtgcagtgggcagagtggaaactggcagggctcatgccctcctccatcatgtagaggaacagctgttatttcaccccactgcacagctgctgtgtgtaagttgaactaggtttgtcagatcatatgactttctgggaaaggataggaatctagattttttttttaaattggtcaaagtattccctccattagtcttacttctttataaggccataaaaagagatgtccctctatgtgagggtctgaattttttttattaactataagttctagggtacatgtgcacaacgtgcaggtttgttacataggtatacatgtgccatgttggtgtgctgtacccattaacttgtcatttacattaggtatttctcctaatgctattcctcccccagcccccgccccgaccctacaacaggccctggtgtgtgatgttccccaccctgtgtccaagtgttctcattgttcaattctcaccaataagtgagaacatgtgtttggttttctgtccttgtggtagtttgctcagaatgatggtttttagcttcatccatgtccctgcaaaggacatgaattcatcctttttatggctgcatagtattccatggtgtatatgtgccagattttcttaatccaatctagatttttatataaaatcttcaaatatttgaacttgttaaattcaaacaaaacagtttggcctacatgtggatgcctgtttactgtttctggtttgaattcattgttttaaaaagagacaatgtgtgaagccttccctgccttggacagtggagtgggctcctttgtcaacaatgtttagtagccttgctgctttcctgagtcactgcgcccttccatgtggcacacaggggccggattaaacagttgggggtggcacaaggatgtgtctttccgcgggtcattttttgaagtaaaataaaagacacagatatatacatcagacacacaagcgcagcacagcacaagatggaaaatgattcattctgttctgcaggtgctacaggaatttgaagaagagaggtcagttcggaccagagactttcaggcttcctggaagaggtggggtagaactccatgtcaccccatgaaatgtgggacggctttcaggacaagttcctgccctggaaataaaaagaagtggggtgtgggactgcaaagaacctcaagggtctacgcagtgaaatgttaattataatgctcattcatttatctctgggtctataaaaggaataaagtggaaaagaagttggacaggagcctccacactagccaaggacatggacaaggagagagaaaaacacagtttaaattcatggtgttcagcagagaaaggagatcttgtaagcaaatgttaattaagtacaatttgaaaatgagtttatagcatcagtgccacactgcggtagttccaattaatctccaacattcctttcatgatccatgaatgtctacctctttacctgtgatggaagagtatagcttgaatggtcattatggttcaaattaaaataactcatctctagcatatgagatatatgagtcacccattttcacaacttaatttatacttgattctcaacaacaaaaaacaaataaagatgtgatttagctctgctctaaacccagactccagtccctatctcctccaaatcatctatcttgctgtaatcaacatttttatttcattttattttatttttatttttattttttgtagagatggagtcttactatattgctcaggctggtcttgaactcctggcttcaagtgatcctctcacctcagcctccccaaatgctaaaattacaggcatgagcaccactgcacctggccctgaattttctttttaaatcacaaatcaaatcatgtcactgccctacttagcatccttcaaaactgacccatagacactgaagctttggtttagcacaaggtggggccctgtctgaaccagaagcatgcacgtttgaggaggaagtggtagctgactataacatttaatatgtctcactactgtagtttttgacgtgcttttttcactccaacccaacagaaaatgacacacccatattatgggtgaaaaacaattgctgtgctagctagccattattaataatgagcatgtataagaggcttctggcaaatttggggtaggagaaacacttgagaacagagagatgagtgattaagacagataaagtcctagttccaaagattggcacatgatgacctgctctgatattttccagagtgtgcatgaaatatggtgttagaggctaatagacccagcattaaatcacactaaattgtagagaaaaaatatttttagcttttaagatttattttgtcctattttattttacaaattaaaaagagaaagtttccatttgggcaaacatatcgttagcagtattttagccgaagcattttgactgctgtttaaaaaaaaaatcctaaaatctcagtgaatttacacaatccaaagtcattttttattcagtgagtacgattatggggcagcctttcacacagtgactcatgatccagtttcccagactcccttgctgtgggctgtggttatgtgactgagttctatccaacggaatgagacagaagtgattgagtgcctcccacacggtgacccaaggaccacattttctgccatcctgtggctctgccatctgctagggtctcagagatttttatctggctcgtttttattcaactaacagagaaggagaagagagggaatgtgaaggcagcatggaagtttattatgaaagtccttgaagaggtactcatcacttctgtctcatttcattggctagagctcagtcacatgatcacagcccactgcaaagaattctgggaaatgcagtcatgctgcatgcccagaaagaaggctttgagtaatctcctggagatgctccataatatggcaggcactaagacttcaggcgtggagccttcccaagtagtgccattttcactagagtttaataacattgttttgttttcattctacttattttatgttttccatttttagcaattgaaactggtttttcttctatggcagaaatataaaattttcttacaaaatgaatttaaattaagaaaagcgaatctatttaagaaaaaaatgaataaataaataaaagtagaatacagaaatcacaaaatctactatggaaacacatcaatgaacacttcattatttgatctacttttgaattagtttttcagtctaattttcagagactctgcttctgcccacaacttctcacagtaagtcaacttgcaagctatcctctcattgagctctggctggccatgaatgaggagaccaattttctactaccaaaattaaaaacagtgaccttttcccaattctcaggagcaaactatttatgtaataaaccaaatattctcctacttttaatttccctttattaatttaaaaaaatgctttggcacttagctgctggatctaacatgaggcttagaatgatatcatatattgacttatttgaaattacatttaatatatctcaagttcattatattctacaacaacagcaaaaaaagagcaaggcatccaggtgagctgtgttccaaacaagttacagaattatgccacagcatttgctgatttcatccgcatgtctccctgtccctgctccccctcccaaacccgttcatgtctttctcctacctccataaggtcactcaaatatgtctacctccccttaccgtccaccaccactactgcctaccatcttgtaatcctcaatctcctcctcattcctactgttttcagacccatcctccacccctgcggcctttgtgacctctctaaaatcaaaatctcatcatgctctttcttgcttaaaacttttaaatgttgctccatttgtccacagaataaacatcacacttctgaccttgacccatctggcccatgaggacttttttctgctgacatggccagcctcacctcctctcagcttcccagcatccccaccgtgcggggccccagcccaagattctctctctacttaacaaattactcctttcctttcctgctgccaaagagctcactttcgcctgataaggccaggtgagggcttctcttatgagctcccacagcacactgtgcttatcatttttatatcagacattgtaaaccaggcttattttgagctccaagaggatgctgattatgtttttttttatttttatatccccagtgttaaattgaactacttatagtagacactcaagtatatgtaagaaggtttctgttttgttttgtttttgtctgtccagaaactctcctgacatctgtttcaagcacctcttgtttgggagaattgctcctttcccctccaactgaggtcttcagaggctcctatatgtagtctctggccaatccaagtcaagccaatcactgttcttcctggggatttttcaaactgaaattcaggaaaaagtactggtcctatgatggtaacaaagctgagaaatgtgagtgggccaagggcagagcaaggcatgcagaaaagtcatgtatcaatgcagaagacggccagcagcaaagagattatcagctcccctttgttttaggtataaaaataaaatgtctagaagtggttcaatcgcactttaaccaaatccaagctactattaagtgagaaagcaattcagtgcattaaagtaagaatatgcaaggttcaccttttgaatatttcaaactttctcatgagcttacctccccaatgagacattaaattgcttgaggcataaactgtctttatgttacacagaacttagtgtaaggctgggcacaaagtgggacttatgaaaagaatcagatggaatgaatgagtaaaggaaggcaggcatgaatgtaatgtctcaagttatattactctagaatgtttaagagctttatagccataatgcaaatgtatgctctgactcgaccaggttgacctacgagatcttgttctcaaacccgaattccatgtcccatgagatctggagctgccactccaacactggtacagtgctgccactctcttgcccacgcatttctcagcttcctgcagccatgtgcattctccaattcatcccatatcaacttgagtttcaaaacctagagtcatcacaggtttttaaaaggaacagcatcacactaagtatctcatgtttttgtttttgtttttgttttttgtagacttcattgagatttatgggaaagttcacaacacacagtacctcactcccaccctctcccagcctctctttccctctctctttttctgcccccacgccctctgcagaagacaacaacaacaacaacaaaaacctgaattattccccttgggtcatgcaaaacacacctgcccacatccaggccctctaggaccccagtcctctacttttagaagcttatcaaagttcgtcttccaaatgcatccagcagcctcccaagaaaaaataatggtcagtggcactttcttcattacactatatagttattctaaaattccaataggaagtgagaactttccaataaaatctttgaggatttacacagcccgtgtgaaaatactcatgacagaaagagcaacagaacccggcgcgcaggaactaaaaatatttttaacattaattgcaattaaagcagaactctaagagatgacaagttacctaacacacattcatctgtgtgaaaagaaacctttcaacacatagaagctccctgatatgctgcctcaaaatactcaatcagggagaaattcagctccaaagaggtattttgatagatgcttccaatcagtagacacaagaacagggtggcatgccatgttcgttttggggctgccatccatctgtaggttatcaaaacaggcccgcactgatgaagatatcctgaaccaagcggcagaaactgcaatcatactgattttcactcagaataaacaaatcagattttcccttgggagcagccaagaaagtctgtgtggccagcttgaaaataatatgttgctgtcagcccagcatccattagcagccgctttcttctggtaaaaacaaacaaacaaaaaaagcagtgctgttgtgttgttggaaaatggttatctggtgccccctggttctgacactactgaatttccaaggagagtactgaatcattgagtttcaaatttcccagttctttgtcttaaagagctatttggcccataggcccagttgggggcacaggtgagcagaagctgaggctacccaatgggacaaggcagacattggggagcagtcaattcccaagccacccatagagctacaggtaaattgctgtcctcacctggagaatgagtgcttgcctcagccttgagaagaagctgtcattacacacagaatggaactaatgaaactttctattctgagctccccaaatcttccttagcatgggaatttttctgcaggtgcagtgtctgatgcagagacactcctctccccaggtgtcaaaagaatcctttgtgcttcaagatgcagggagtgattgatgagaagcccgtgcacagaaaagaaatcactcaactctttcaacagaaattattatctgctgagtgccaaagatgacagcaggctttatgaaattatggagcatatatatataaaatgcatgtatgtgtgtatatatatgtatacagacatacatacacacagaagtattggataccttgatatgtgtaccaagcacttaaatgcattgtgtgtaagctccgtggtgcttacagtttatcaagtggatttataaaattatgaattaagacaatgcacaatatctgcctaaagaaagttccaaacatgtggttccagaggttcaggggacagaggaaaaaaacataaaggagaaaccagacacccacggcagagagaggctttcctctcttacgtcagagatggcatcaaaatgtatttcaggcccagggcattggctcatgcctgtaatcccagcagttagagaggccaaggtgggaggatcacttgaggccagaatttgagaccagcctgggcaacatagaaagatcccagtctctacaaaaaaaaaaaaaaattaaaaatcagccaggttttgtggtaggcacctgtagtcccagctacttgggaggctgaggtgggaggatcacttgagtccaggggttccaggctgcaatgagctgtgtcaacagggcaggaccttgtctctcaaaaaagaacaattgtgatctgtttaggatgttttgcccgtcttgctgtgtctttattgcaagggttccaatagcacctgaggtagtttgtagactctggttctgtctaataaattggcttcttcaggtgtctatttgcatatgttgatatcacagaatgaagaaggcctggagcaggacattttccattcagatccctgaggacagtggaggcagaggcagagagatgcagagggcaatatccccacagggacgagtgcagagagcttctctgcaggagaaagatgagggcattgtttccacggggatttttttgagggctgaggcacaagcagccacgctttgacacaaatcccgcaaaaaaaaagctctcaggaaacaaagcacaaaacccggacttcttctctcctttcttgtgaaagctgctacctcagaggagcgagcatgggaaaggagactcctgttcacaggaggctaccagcagactttggaaagaggggatagaactcctggatccatcctggaaggcgggttgtcacctagggctctttgtcagcaggaggggcacagctgaggtggagcccaggagaggctgtggctcttatcaggacctgctgggcccagaaagcagagccacaaaagatgcagggatcgccatgcaggctcctccccgcctctcccaggaaaccagacacccacggcagagggaggcttctggagctcatgctcaccctctctcacaatgcttaaatccatggtggtgcttagaatgttaggaaccaaggcaaaagccccagattcacaactggatgaatggtgctaacagaatccaaatttagttggagacagattttcacacttatttgtttcccaaagtttaattttcataaattttcattttagaatactactgttctttccatggccaccctatttgtccatcccagtttaatctggggccattgtcaacatcagccccaaaaagtacacctgaacccaccacacaccagtcactacattggccagaggaggaccagccatggcatagacctcctatcagggtgaggtggtcactcagaggagatccccggaaggcccttcctggtcagaggagatccccagatctctcctggcttctcctggcctttgattaggaactcaggacaggcagaagcccctgaactaccatcaccctcactggcagagatggtggattccacaagaatcacctctggagagctttggccatgggcttcggaactcttcatggcaccaacctgccttagcacctgttctcctaggttttcttctccatctctgccatttctggaactgtcagttacttccctggaagagacatccaagtcttaccatgggaaacctagatctgcctttttaactctgcccgactcccaggcactagaagaggggctgagggaattgggctgatggctcatcagccaccagctctcctagatgtcgttgcatccctgcagctaatgctggtggagatcacccaggagaagctcacagcctcccacaccacagcagcttctctaacgggagcagggtcctctggcttggccactcccgcagtattctcaagagagaaagcaaaaaagagaagcatcttctgctcccgttttaagtttctcttcccttctcaccatgccacaccagtgcaatggtgaataaataaagcagaatgggtgtcatcacccagaggagtcagcttcgcattgtcagagaagtcactgagcaccaagacctccttctggggagaaacagaggctgggagcggatgctgtgggaggagtcatggtgcagcatctggggcttgtggggaggaagcacagaaagcaaaggtccgagaaccccgcatcacatgcccttttcaacactcagcctctgtcagtcagtttgttctttatgcagaaagagagatcaggaggaagaataggagagttgaaaagggcaagaaggttcaggaaaatggcttggtggaaaataccaagctgttgctttgatttggagcttctttctttccacagctcatcatctgcttccaccccagggtgatttcagctgtcatccttccttctgatcctgcttccatttcagctctgggatgtctgcagccatgtctcttccagccccagtctctccatcccttcccctttccccactccgtcttcacatgagatgcacactctgagtgcccttctaaacagctgcaccttctaattctctctagagaacattagctctttggtctcctcagcaccaaccgtctcgagttgtctcagctacggagatacagagccttcctttcctcttaggagcatcactccttccctatctatgcatttaatcagaatgggagctgtcacatctttctgaggggtggcatctatcctgagctaatctaaatatgtgtacccacaatggcaggagtgcttggtccagggacggagcacaaggcagatcagtcgcaatgctgtcatgaggatttctaactgaagctgaggcatgaagtatggaaataaacaaagaccaacaaaatgagaactaggaaagcctatgtattcagagctttcaatggagccaaccaccatcattcgcattttagcatcactcagggtcagacagaggagtgggaaagcattttagtagaaacaagggaaggtttcatgtgcgccctgattgaaggctgttggcacagggaagctgtaggcctgctacctagaagagggggtcctaggcagtaggttaggggtgcatatttggatttatctgattggccttaatttggaagcagggacaaacattaggaaatctgtcaattataaatcaagtcttgaccatttggggttgattgttttagaatttattgttgagcttccccgattttcgctagagaagagccatctgactttctatatgtctgacatatcagactggcatcctggcctgtttattgtatataaatgggccagtttcctgggtgggtttgatggaggttgtgggtcaaagtttcatctttctatgtggtctggccactgtccagttgtatgtccagtgtctctgtaattaagatgatgaggacctacaggtggccaggtttttctcccttgtaagaaataatcactgtaagaatgaggccaggccaggcacagtggctcacacctgtaatcctagcactttgggaggccgaggtgggtggatcacctgaggtcaggaatttgagaccagcatgaccaacatggcaaaaccccgtctctactaaaaatacaaaaatttgttaggtgtggtggtgcacgcttgtaatcctagctacttgggaggctgaggaattgcttgaatccaggcagtagaggttgcagtgagccgagatcatgccactgcaatccagcctgcatgacaggagcgagactccatctcaaaaaatcagaatgaggccaataagcagagagaagtgagaatgaaagagaatgaaaggccaacaatagcctgggtgctgtttgagctcctggtcctagccattctaaggatagctgcatttctggcattctttgtggatttctgagtcaatccttcctttgatgttaagagccaatagttaccatttatgactgctaatttgagttatgtggcaccaggggagtcctgccctgcctcctcactggtggcttccccgccactggcccagtgttccttcccattcctcgcctgccatgatccctgacatctaatgctggtcatcagaagcctgtatgaatccacaccttggcagctttccttcttccctccttcagaccctccagcttccactgccccttttgggatcctctgatcaaccctgtaaatctcctgcagcctgactttttgttccacttccctgcatgctttcccctcaggggttgtccactcacggggcctcagttatcacttctaagtggcttccaggttcctgggcccagcactgattctctcctacctgggccccagcattaccgacccagtttcccatcttcccagcagcctcaccaggtctcgcaaggaactcggcaccttccacagcaaatgctgtagggtttctgttgggaagcaggctatagctctgacactgctgagccgcaaatgtgaagtcctgtctgggcttcttcccatttcctcttatgtctcatccatagacacagcagaaattgtcatcttcacaggaaacagagacttcaagggctttcccaaagtcagaagactcatgagcagcagagccagcacatctagaagctgcgctatggcattttccaagccacgcttccttggaaccctctggaaccacagcacagctctcaaggagacaggctgctgtaggggcttaggatacatgtccagctgccccagtgacagcctcactgcccaagctggagggctgaggctgaaaaatcttataaatgccatggactgagtcttgtcttggttttatccacacattctccccaagaatttccccacaaataaatttatgtaaccagatcatctctacaaggtatgtccctgttcaaccccaatgtagagaatctgagtcttaaagagtcaaaaggaacccagaggctacctcatagagacctgtgcacagcacacactgccccattcctcagcgcaggcaaatagccctcaagactcagctcaaacagctctgtgctgggaagccaccagaacagccttcaaattcatgagtgactttggtggaaagacttcctgatgctaaggtgaattggggcacagcttccgcccactgtgaattctccatccgaagccacatggcagccttccagaagcaccaagccttcctcagccagtccccactatgcctcttttctcaggctcagcatcctcagtcctccaggtgacctgatttccaggcactttccccctggccttttcccacctagactgccagtcacctgtttaacagatgcctccctaa
